(19) United States
(12) Patent Application Publication
(10) Pub. No.: US 2025/0019667 A1
(43) Pub. Date: Jan. 16, 2025

(54) ADENOVIRAL HELPER PLASMID

(71) Applicant: Forge Biologics, Inc., Grove City, OH (US)

(72) Inventor: David Dismuke, Cary, NC (US)

(21) Appl. No.: 18/560,651

(22) PCT Filed: May 13, 2022
(86) PCT No.: PCT/US22/29193

§ 371 Date: Nov. 13, 2023

Related U.S. Application Data
(60) Provisional application No. 63/188,294, filed on May 13, 2021.

(51) Int. Cl. C12N 7/00; C12N 15/86

(52) U.S. Cl. CPC C12N 7/00; C12N 15/86; C12N 2710/10322; C12N 2710/10344; C12N 2750/14143; C12N 2750/14151

(57) ABSTRACT

The present disclosure provides improved adenoviral helper plasmids for the production of recombinant adeno-associated viruses.

### CROSS-REFERENCE TO RELATED APPLICATIONS

[0001] The present application claims the benefit of U.S. Provisional Application No. 63/188,294 filed May 13, 2021, the content of which is hereby incorporated herein by reference in its entirety.

### SEQUENCE LISTING

[0002] The instant application contains a Sequence Listing which has been submitted electronically in ASCII format and is hereby incorporated by reference in its entirety. Said ASCII copy, created on Jul. 5, 2022, is named 2013906-0023_SL.txt and is 722,042 bytes in size.

### BACKGROUND

[0003] Adeno-associated virus (AAV) technology has quickly become a dominant form of gene therapy for genetic diseases. AAVs can be produced in large scale in a variety of host cell systems, including mammalian cells, such as HEK293 cells. Traditionally, AAV production in mammalian cells involves the introduction of multiple plasmids to the host cells, the plasmids encoding, for example, a human gene or genes of interest, and various viral genes critical for viral replication and packaging. Due to the number of genes required for proper replication, these are traditionally delivered on two or three separate plasmids.

[0004] One such plasmid, termed an “adenoviral helper” plasmid, contains genes critical for AAV production from a host cell. Adenoviral helper plasmids containing E2a, VA RNA, and E4 genes have been shown to be critical to promoting AAV production in mammalian host cell systems.

[0005] Despite much advancement over the last two decades, concerns regarding the cost and safety of AAV production continue to limit the therapeutic potential of AAV technology. These concerns are due in part to the large size of many helper plasmids, which is due to the provision of a large number of genes on a single helper plasmid to support AAV production. The safety concerns are due in part to the production, albeit at low levels, of potentially cytotoxic and/or inflammatory viral proteins that are not necessary for AAV replication.

### SUMMARY

[0006] In some embodiments, the present disclosure, provides, among other things, an adenoviral helper plasmid. In some embodiments, the present disclosure provides an adenoviral helper plasmid with reduced size relative to those known in the art. In some embodiments, the present disclosure provides an adenoviral helper plasmid comprising nucleotide sequences encoding E2a, VA RNA, E4; and an L4 region. In some embodiments, an adenoviral helper plasmid as described herein comprises nucleotide sequences encoding proteins from other viruses. In some embodiments, an adenoviral helper plasmid as described herein comprises nucleotide sequences encoding proteins from other viruses, including HSV-1 UL30, HSV-1 UL42, and/or HSV-1 UL29.

[0007] In some embodiments, the present disclosure provides an adenoviral helper plasmid that does not comprise one or more nucleotide sequences encoding one or more of fiber protein; L1-52/55K (Packaging Protein 3), peripentonal Hexon-Associated protein, and an L4 region. In some embodiments, the present disclosure provides an adenoviral helper plasmid comprising a fragment, portion, or partial form of E2a protein, VA RNA, E4, L1-52/55K (Packaging Protein 3), peripentonal Hexon-Associated protein, and an L4 region. In some embodiments, the present disclosure provides an adenoviral helper plasmid that does not comprise one or more nucleotide sequences encoding one or more of Hexon Associated Precursor (L4 pVIII) protein, DNA Terminal Protein, and 23 kDa endoprotease. In some embodiments, the present disclosure provides an adenoviral helper plasmid that does not comprise one or more nucleotide sequences encoding one or more of E4orf1 and E4orf2. In some embodiments, an adenoviral helper plasmid provides herein comprises a kanamycin resistance gene.

[0008] In some embodiments, the present disclosure provides an adenoviral helper plasmid in which expression of E2a protein is under the control of one or more of an E2a promoter, chicken β-actin promoter, and SV40 promoter. In some embodiments, the present disclosure provides an adenoviral helper plasmid in which expression of E4 open reading frame (orf) is under the control of one or more of a chicken β-actin promoter and SV40 promoter.

[0009] In some embodiments, the present disclosure provides an adenoviral helper plasmid comprising a nucleotide sequence that is at least 80% identical to SEQ ID NO: 1-3, 5, 7, 9, 11-12, 14-20, 22, 24, 26-29, 31, 33, 35-37, 39-70, 72, 74, 76, 78, or 80. In some embodiments, the present disclosure provides an adenoviral helper plasmid comprising a nucleotide sequence that encodes for an amino acid sequence that is at least 80% identical to SEQ ID NO: 4, 6, 8, 10, 13, 21, 23, 25, 30, 32, 34, 38, 71, 73, 75, 77, 79, or 81. In some embodiments, the present disclosure provides an adenoviral helper plasmid comprising a nucleotide sequence that is at least 80% identical to any one of SEQ ID NO: 41-66.

### BRIEF DESCRIPTION OF THE DRAWING

[0010] FIG. 1. shows a plasmid map illustrating adenoviral helper plasmid pEMBR-1.2.

[0011] FIG. 2. shows vector yields obtained using pEMBR-1.2 and commercially available pX80 as the adenoviral helper plasmid.

[0012] FIG. 3. shows vector transgene purity and vector capsid purity obtained using pEMBR-1.2 or commercially available pX80 as the adenoviral helper plasmid.

[0013] FIG. 4. shows a comparison between the GFP expression levels obtained following the transformation of HEK293 cells with recombinant AAV RH.10, ssCMV-GFP transgene, and either pX80 or pEMBR helper plasmid.

[0014] FIG. 5. shows a plasmid map illustrating adenoviral helper plasmid pEMBR-1.3 and pEMBR-1.3B.

[0015] FIG. 6. shows a plasmid map illustrating adenoviral helper plasmid pEMBR-1.4 and pEMBR-1.4B.

[0016] FIG. 7. shows a plasmid map illustrating adenoviral helper plasmid pEMBR-1.5.

[0017] FIG. 8. shows a plasmid map illustrating adenoviral helper plasmid pEMBR-1.2B2C.

[0018] FIG. 9. shows a plasmid map illustrating adenoviral helper plasmid pEMBR-1.2B2D.

[0019] FIG. 10. shows a plasmid map illustrating adenoviral helper plasmid pEMBR-1.5A.

[0020] FIG. 11. shows a plasmid map illustrating adenoviral helper plasmid pEMBR-1.55B2.

[0021] FIG. 12. shows a plasmid map illustrating adenoviral helper plasmid pEMBR-1.55B2 OO.

[0022] FIG. 13. shows a plasmid map illustrating adenoviral helper plasmid pEMBR-1.55B2C.

[0023] FIG. 14. shows a plasmid map illustrating adenoviral helper plasmid pEMBR-1.55B2C OO.

[0024] FIG. 15. shows a plasmid map illustrating adenoviral helper plasmid pEMBR-1.55B2D.

[0025] FIG. 16. shows a plasmid map illustrating adenoviral helper plasmid pEMBR-1.55B2D OO.

[0026] FIG. 17. shows vector yields obtained (VG/mL) using various pEMBR plasmids as the adenoviral helper plasmid as measured by qPCR.

[0027] FIG. 18. shows vector yields obtained (VG/mL) using various pEMBR plasmids and pHelper as the adenoviral helper plasmid as measured by qPCR.

### DEFINITIONS

[0028] Agent: In general, the term “agent”, as used herein, is used to refer to an entity (e.g., for example, a lipid, metal, nucleic acid, polypeptide, polysaccharide, small molecule, etc, or complex, combination, mixture or system [e.g., cell, tissue, organism] thereof), or phenomenon (e.g., heat, electric current or field, magnetic force or field, etc). In appropriate circumstances, as will be clear from context to those skilled in the art, the term may be utilized to refer to an entity that is or comprises a cell or organism, or a fraction, extract, or component thereof. Alternatively or additionally, as context will make clear, the term may be used to refer to a natural product in that it is found in and/or is obtained from nature. In some instances, again as will be clear from context, the term may be used to refer to one or more entities that is man-made in that it is designed, engineered, and/or produced through action of the hand of man and/or is not found in nature. In some embodiments, an agent may be utilized in isolated or pure form; in some embodiments, an agent may be utilized in crude form. In some embodiments, potential agents may be provided as collections or libraries, for example that may be screened to identify or characterize active agents within them. In some cases, the term “agent” may refer to a compound or entity that is or comprises a polymer; in some cases, the term may refer to a compound or entity that comprises one or more polymeric moieties. In some embodiments, the term “agent” may refer to a compound or entity that is not a polymer and/or is substantially free of any polymer and/or of one or more particular polymeric moieties. In some embodiments, the term may refer to a compound or entity that lacks or is substantially free of any polymeric moiety.

[0029] Approximately/about: As used herein, the term “approximately” or “about,” as applied to one or more values of interest, refers to a value that is similar to a stated reference value. In certain embodiments, the term “approximately” or “about” refers to a range of values that fall within 25%, 20%, 19%, 18%, 17%, 16%, 15%, 14%, 13%, 12%, 11%, 10%, 9%, 8%, 7%, 6%, 5%, 4%, 3%, 2%, 1%, or less in either direction (greater than or less than) of the stated reference value unless otherwise stated or otherwise evident from the context (except where such number would exceed 100% of a possible value).

[0030] Comparable: As used herein, the term “comparable” refers to two or more agents, entities, situations, sets of conditions, etc., that may not be identical to one another but that are sufficiently similar to permit comparison therebetween so that one skilled in the art will appreciate that conclusions may reasonably be drawn based on differences or similarities observed. In some embodiments, comparable sets of conditions, circumstances, individuals, or populations are characterized by a plurality of substantially identical features and one or a small number of varied features. Those of ordinary skill in the art will understand, in context, what degree of identity is required in any given circumstance for two or more such agents, entities, situations, sets of conditions, etc to be considered comparable. For example, those of ordinary skill in the art will appreciate that sets of circumstances, individuals, or populations are comparable to one another when characterized by a sufficient number and type of substantially identical features to warrant a reasonable conclusion that differences in results obtained or phenomena observed under or with different sets of circumstances, individuals, or populations are caused by or indicative of the variation in those features that are varied.

[0031] Corresponding to: As used herein, the term “corresponding to” may be used to designate the position/identity of a structural element in a compound or composition through comparison with an appropriate reference compound or composition. For example, in some embodiments, a monomeric residue in a polymer (e.g., an amino acid residue in a polypeptide or a nucleic acid residue in a polynucleotide) may be identified as “corresponding to” a residue in an appropriate reference polymer. For example, those of ordinary skill will appreciate that, for purposes of simplicity, residues in a polypeptide are often designated using a canonical numbering system based on a reference related polypeptide, so that an amino acid “corresponding to” a residue at position 190, for example, need not actually be the 190^{th} amino acid in a particular amino acid chain but rather corresponds to the residue found at 190 in the reference polypeptide; those of ordinary skill in the art readily appreciate how to identify “corresponding” amino acids. For example, those skilled in the art will be aware of various sequence alignment strategies, including software programs such as, for example, BLAST, CS-BLAST, CUSASW++, DIAMOND, FASTA, GGSEARCH/GLSEARCH, Genoogle, HMMER, HHpred/HHsearch, IDF, Infernal, KLAST, USEARCH, parasail, PSI-BLAST, PSI-Search, ScalaBLAST, Sequilab, SAM, SSEARCH, SWAPHI, SWAPHI-LS, SWIMM, or SWIPE that can be utilized, for example, to identify “corresponding” residues in polypeptides and/or nucleic acids in accordance with the present disclosure.

[0032] Downstream: As used herein, the term “downstream” refers to the location or position of a nucleic acid sequence relative to a reference nucleic acid sequence, particularly a position that, during RNA transcription, is closer to the 3′ end of the transcribed RNA molecule encoded by the reference sequence. For example, for two sequences, A and B, such that sequence A is downstream of sequence B, transcription of sequence B proceeds toward sequence A.

[0033] Nucleic acid: As used herein, in its broadest sense, the term “nucleic acid” refers to any compound and/or substance that is or can be incorporated into an oligonucleotide chain. In some embodiments, a nucleic acid is a compound and/or substance that is or can be incorporated into an oligonucleotide chain via a phosphodiester linkage. As will be clear from context, in some embodiments, “nucleic acid” refers to an individual nucleic acid residue (e.g., a nucleotide and/or nucleoside); in some embodiments, “nucleic acid” refers to an oligonucleotide chain comprising individual nucleic acid residues. In some embodiments, a “nucleic acid” is or comprises RNA; in some embodiments, a “nucleic acid” is or comprises DNA. In some embodiments, a nucleic acid is, comprises, or consists of one or more natural nucleic acid residues. In some embodiments, a nucleic acid is, comprises, or consists of one or more nucleic acid analogs. In some embodiments, a nucleic acid analog differs from a nucleic acid in that it does not utilize a phosphodiester backbone. For example, in some embodiments, a nucleic acid is, comprises, or consists of one or more “peptide nucleic acids”, which are known in the art and have peptide bonds instead of phosphodiester bonds in the backbone, are considered within the scope of the present invention. Alternatively or additionally, in some embodiments, a nucleic acid has one or more phosphorothioate and/or 5′-N-phosphoramidite linkages rather than phosphodiester bonds. In some embodiments, a nucleic acid is, comprises, or consists of one or more natural nucleosides (e.g., adenosine, thymidine, guanosine, cytidine, uridine, deoxyadenosine, deoxythymidine, deoxy guanosine, and deoxycytidine). In some embodiments, a nucleic acid is, comprises, or consists of one or more nucleoside analogs (e.g., 2-aminoadenosine, 2-thiothymidine, inosine, pyrrolo-pyrimidine, 3-methyl adenosine, 5-methylcytidine, C-5 propynyl-cytidine, C-5 propynyl-uridine, 2-aminoadenosine, C5-bromouridine, C5-fluorouridine, C5-iodouridine, C5-propynyl-uridine, C5-propynyl-cytidine, C5-methylcytidine, 2-aminoadenosine, 7-deazaadenosine, 7-deazaguanosine, 8-oxoadenosine, 8-oxoguanosine, 0(6)-methylguanine, 2-thiocytidine, methylated bases, intercalated bases, and combinations thereof). In some embodiments, a nucleic acid comprises one or more modified sugars (e.g., 2′-fluororibose, ribose, 2′-deoxyribose, arabinose, and hexose) as compared with those in natural nucleic acids. In some embodiments, a nucleic acid has a nucleotide sequence that encodes a functional gene product such as an RNA or protein. In some embodiments, a nucleic acid includes one or more introns. In some embodiments, nucleic acids are prepared by one or more of isolation from a natural source, enzymatic synthesis by polymerization based on a complementary template (in vivo or in vitro), reproduction in a recombinant cell or system, and chemical synthesis. In some embodiments, a nucleic acid is at least 3, 4, 5, 6, 7, 8, 9, 10, 15, 20, 25, 30, 35, 40, 45, 50, 55, 60, 65, 70, 75, 80, 85, 90, 95, 100, 1 10, 120, 130, 140, 150, 160, 170, 180, 190, 20, 225, 250, 275, 300, 325, 350, 375, 400, 425, 450, 475, 500, 600, 700, 800, 900, 1000, 1500, 2000, 2500, 3000, 3500, 4000, 4500, 5000 or more residues long. In some embodiments, a nucleic acid is partly or wholly single stranded; in some embodiments, a nucleic acid is partly or wholly double stranded. In some embodiments a nucleic acid has a nucleotide sequence comprising at least one element that encodes, or is the complement of a sequence that encodes, a polypeptide. In some embodiments, a nucleic acid has enzymatic activity.

[0034] Operably linked: As used herein, the term “operably linked” refers to a juxtaposition wherein the components described are in a relationship permitting them to function in their intended manner. A control element “operably linked” to a functional element is associated in such a way that expression and/or activity of the functional element is achieved under conditions compatible with the control element. In some embodiments, “operably linked” control elements are contiguous (e.g., covalently linked) with the coding elements of interest; in some embodiments, control elements act in trans to or otherwise at a distance from the functional element of interest.

[0035] Producer cell: As used herein, the term “producer cell” refers to any cell used to produce recombinant AAV (rAAV). In some embodiments, a producer cell is a mammalian cell. In some embodiments, a producer cell is a transformed mammalian cell. In some embodiments, a producer cell is a Vero, HeLa, HEK293, HEK293T cell or derivative thereof.

[0036] Transformation: As used herein, the term “transformation” refers to any process by which exogenous DNA is introduced into a host cell. Transformation may occur under natural or artificial conditions using various methods well known in the art. Transformation may rely on any known method for the insertion of foreign nucleic acid sequences into a prokaryotic or eukaryotic host cell. In some embodiments, a particular transformation methodology is selected based on the host cell being transformed and may include, but is not limited to, viral infection, electroporation, mating, lipofection. In some embodiments, a “transformed” cell is stably transformed in that the inserted DNA is capable of replication either as an autonomously replicating plasmid or as part of the host chromosome. In some embodiments, a transformed cell transiently expresses introduced nucleic acid for limited periods of time.

[0037] Upstream: As used herein, the term “upstream” refers to the location or position of a nucleic acid sequence relative to a reference nucleic acid sequence, particularly a position that, during RNA transcription, is closer to the 5′ end of the transcribed RNA molecule encoded by the reference sequence. For example, for two sequences, A and B, such that sequence A is upstream of sequence B, transcription of sequence B proceeds away from sequence A.

[0038] Vector: As used herein, the term “vector” refers to a nucleic acid molecule capable of transporting another nucleic acid to which it has been linked. One type of vector is a “plasmid”, which refers to a circular double stranded DNA loop into which additional DNA segments may be ligated. Another type of vector is a viral vector, wherein additional DNA segments may be ligated into the viral genome. Certain vectors are capable of autonomous replication in a host cell into which they are introduced (e.g., bacterial vectors having a bacterial origin of replication and episomal mammalian vectors). Other vectors (e.g., non-episomal mammalian vectors) can be integrated into the genome of a host cell upon introduction into the host cell, and thereby are replicated along with the host genome. Moreover, certain vectors are capable of directing the expression of genes to which they are operatively linked. Such vectors are referred to herein as “expression vectors.” Standard techniques may be used for recombinant DNA, oligonucleotide synthesis, and tissue culture and transformation (e.g., electroporation, lipofection). Enzymatic reactions and purification techniques may be performed according to manufacturer's specifications or as commonly accomplished in the art or as described herein. The foregoing techniques and procedures may be generally performed according to conventional methods well known in the art and as described in various general and more specific references that are cited and discussed throughout the present specification. See e.g., Sambrook et al., Molecular Cloning: A Laboratory Manual (2d ed., Cold Spring Harbor Laboratory Press, Cold Spring Harbor, N.Y. (1989)), which is incorporated herein by reference for any purpose.

### DETAILED DESCRIPTION OF CERTAIN EMBODIMENTS

[0039] The helper functions adenoviruses provide for AAV replication have been previously described. Without wishing to be bound by any particular hypothesis, adenoviral E1A protein has been described to activate AAV gene expression by binding and activating the AAV P5 rep promoter. Similarly, E2A, another adenoviral protein, has been described to activate AAV P5 promoter transcription. E2A has also been described to cooperate with virus associated RNA I (VA RNAI) to enhance the translation of AAV RNAs. Adenoviral E4orf4 has been shown to induce cell-cycle arrest at the G2/M border, as well as to aid in AAV production. Adenoviral E4orf6 has been described to enhance the conversion of single-stranded recombinant AAV genomes into double-stranded genomes, a rate-limiting step of viral DNA-replication both in vitro and in vivo. VA RNAI has also been described to support AAV replication. It has been described that VA RNAI physically interacts with the double-stranded RNA-activated protein kinase (PKR), which would otherwise elicit an antiviral immune response blocking viral protein production.

[0040] Prior studies have suggested that in HEK293 cells, which provide the E1 gene, the minimal set of genes in trans for efficient recombinant AAV production is E2a, E4orf6 and the VA RNAI gene. A helper plasmid named pXX6, containing this set of genes, is used for the production of adenovirus-free recombinant AAV.

[0041] One major ongoing challenge in the development and optimization of AAV vectors for clinical applications is to increase the amount of viruses being produced. Due to their non-proliferative nature, their production depends solely on the transfection efficiency of the parvoviral genomic components into the packaging cell lines (for example human embryonic kidney cells, HEK293 or HEK293T, or insect cells e.g., Sf9). Thus, it remains of high importance to develop means to increase recombinant AAV (rAAV) production.

[0042] Other major challenges related to the production of rAAVs for clinical applications are those related to the cost to produce such rAAVs in large quantities, and also to the safety of the final products themselves. For example, commercially available helper plasmids, such as pXX6-80, appear to transcribe low levels of the Ad fiber protein. Importantly, the fiber protein is not required for AAV production, and could be immunogenic in humans. In addition, the size of pXX6-80 is rather large, at over 18 kb. This large plasmid size increases the difficulty and cost of its manufacturing, which can be highly impactful when sourcing GMP plasmids for the manufacturing of clinical-grade AAV.

[0043] Different versions of adenoviral helper plasmids have been derived by others, including, for example, pFAdDeltaF6 (derived at the University of Pennsylvania) and pHelper (Agilent). The pFAdDeltaF6 plasmid is about 3 kb smaller than pXX6-80, but retains the fiber gene sequence. The pHelper plasmid, which is available from Agilent, is smaller than pXX6-80, at about 11.6 kb. However, it contains an ampicillin resistance gene, which is generally discouraged for plasmids used in AAV production.

[0044] The present disclosure addresses the above-described technical challenges by providing compositions and methods described herein.

[0045] In some embodiments, the present disclosure relates to adenovirus derived helper plasmids (an adenoviral helper plasmid) comprising adenoviral DNA sequences encoding viral helper proteins. In some embodiments, adenoviral helper plasmids of the present invention are used in methods of production of recombinant adeno-associated viruses (rAAVs). In some embodiments, adenoviral helper plasmids of the present disclosure increase production of rAAVs.

[0046] In some embodiments, the present disclosure provides an adenoviral helper plasmid comprising nucleotide sequences encoding proteins derived from sources that are not adenovirus. In some embodiments, the present disclosure provides an adenoviral helper plasmid comprising nucleotide sequences encoding proteins derived from viruses other than adenovirus. In some embodiments, an adenoviral helper plasmid comprises all or a portion of an adenoviral nucleotide sequence encoding adenoviral proteins E2a and E4, as well as non-coding RNA VA RNA. In some embodiments, present disclosure describes improved adenoviral helper plasmids that are smaller than the leading commercially available adenoviral helper plasmids, and that allow for safer and less costly production of rAAVs in producer cell expression systems.

[0047] In some embodiments, the present disclosure provides an adenoviral helper plasmid that has reduced overall size relative to presently available adenoviral helper plasmids (e.g., pXX6-80 at 18.932 kbp; pALD-X80 at 18.876 kbp; pHelper at 11.635 kbp; pFAdDeltaF6 at 15.420 kbp).

[0048] In some embodiments, the present disclosure provides adenoviral helper plasmids having a smaller size. In some embodiments, an adenoviral helper plasmid of the present disclosure is approximately between 6.5 kb and 15.5 kb. In some embodiments, an adenoviral helper plasmid of the present disclosure has a size that is approximately 6 kb, 7 kb, 8 kb, 9 kb, 10 kb, 11 kb, 12 kb, 13 kb, 14 kb, 15 kb, or 16 kb. In some embodiments, an adenoviral helper plasmid of the present disclosure has a size that is approximately 6-7 kb; 6.5-7.5 kb; 7-8 kb; 7.5-8.5 kb; 8-9 kb; 8.5-9.5 kb; 9-10 kb; 9.5-10.5 kb; 10-11 kb; 10.5-11.5 kb; 11-12 kb; 11.5-12.5 kb; 12-13 kb; 12.5-13.5 kb; 13-14 kb; 13.5-14.5 kb; 14-15 kb; 14.5-15.5 kb; 15-16 kb. The smaller size of the adenoviral helper plasmids of the present disclosure enables the simpler and less costly production of AAV at the quantities necessary for large-scale manufacturing of AAV. In some embodiments, removing genes and/or portions of genes makes an adenoviral helper plasmid of the present disclosure safer, since the producing cells would not produce the adenovirus structural proteins (e.g., fiber), that could co-purify with AAV during downstream processing and would therefore present a lower risk of inadvertently introducing adenovirus structural proteins to patients.

[0049] In some embodiments, removal of adenoviral helper genes resulting in a smaller adenoviral helper plasmid enables addition of supplementary genes to further improve AAV quality and yield. Although these supplementary genes increase the size of the plasmid relative to the smallest versions, they enable comparable or higher AAV productivity and are therefore worth the additional cost to produce. Importantly, these plasmids are still smaller than commercially available helper plasmids such as, for example, pALD-X80.

### Adenoviral Helper Plasmids

### Helper Genes and Resistance Genes

[0050] In some embodiments, an adenoviral helper plasmid of the present disclosure comprises one or more nucleotide sequence(s) encoding proteins selected from the group consisting of E2b, E2a, E4orf4, E1B55K, E1b19K, E1a, E4orf6, VA RNA, and combinations thereof.

[0051] In some embodiments, an adenoviral helper plasmid comprises a nucleotide sequence encoding an E2a protein, an E4 region, and a VA RNA region. In some embodiments, an E4 region comprises one or more of E4orf1, E4orf2, E4orf3, E4orf4, E4orf5, E4orf6, and E4orf7. In some embodiments, E4orf1 has a nucleotide sequence that is at least 80%, 85%, 90%, 95%, 99%, or 100% identical to SEQ ID NO: 70. In some embodiments, E4orf1 has an amino acid sequence that is at least 80%, 85%, 90%, 95%, 99%, or 100% identical to SEQ ID NO: 71. In some embodiments, E4orf2 has a nucleotide sequence that is at least 80%, 85%, 90%, 95%, 99%, or 100% identical to SEQ ID NO: 72. In some embodiments, E4orf2 has an amino acid sequence that is at least 80%, 85%, 90%, 95%, 99%, or 100% identical to SEQ ID NO: 73. In some embodiments, E4orf3 has a nucleotide sequence that is at least 80%, 85%, 90%, 95%, 99%, or 100% identical to SEQ ID NO: 74. In some embodiments, E4orf3 has an amino acid sequence that is at least 80%, 85%, 90%, 95%, 99%, or 100% identical to SEQ ID NO: 75. In some embodiments, E4orf4 has a nucleotide sequence that is at least 80%, 85%, 90%, 95%, 99%, or 100% identical to SEQ ID NO: 76. In some embodiments, E4orf4 has an amino acid sequence that is at least 80%, 85%, 90%, 95%, 99%, or 100% identical to SEQ ID NO: 77. In some embodiments, E4orf6 has a nucleotide sequence that is at least 80%, 85%, 90%, 95%, 99%, or 100% identical to SEQ ID NO: 78. In some embodiments, E4orf6 has an amino acid sequence that is at least 80%, 85%, 90%, 95%, 99%, or 100% identical to SEQ ID NO: 79. In some embodiments, E4orf7 has a nucleotide sequence that is at least 80%, 85%, 90%, 95%, 99%, or 100% identical to SEQ ID NO: 80. In some embodiments, E4orf7 has an amino acid sequence that is at least 80%, 85%, 90%, 95%, 99%, or 100% identical to SEQ ID NO: 81. In some embodiments, an adenoviral helper plasmid does not comprise a nucleotide sequence comprising E4orf1. In some embodiments, an adenoviral helper plasmid does not comprise a nucleotide sequence comprising E4orf2. In some embodiments, an adenoviral helper plasmid does not comprise a nucleotide sequence comprising E4orf1 and does not comprise a nucleotide sequence comprising E4orf2. In some embodiments, expression of the E4 region is under the control of an E4 mini promoter. In some embodiments, an E4 region is operably linked to an E4 mini promoter. In some embodiments, an E4 mini promoter has a nucleotide sequence that is at least 80%, 85%, 90%, 95%, 99%, or 100% identical to SEQ ID NO: 1. In some embodiments, an E4 region is operably linked to an SV40 promoter. In some embodiments, expression of the E4 region is under the control of an SV40 promoter. In some embodiments, an SV40 promoter has a nucleotide sequence that is at least 80%, 85%, 90%, 95%, 99%, or 100% identical to SEQ ID NO: 2.

[0052] In some embodiments, an adenoviral helper plasmid of the present invention comprises a resistance gene. In some embodiments, an adenoviral helper plasmid of the present invention comprises an ampicillin resistance gene (e.g., a nucleotide sequence encoding a protein conferring resistance to ampicillin). In some embodiments, an adenoviral helper plasmid of the present invention does not comprise an ampicillin resistance gene. In some embodiments, an adenoviral helper plasmid of the present invention comprises a kanamycin resistance gene (e.g., a nucleotide sequence encoding a protein conferring resistance to kanamycin). In some embodiments, an adenoviral helper plasmid of the present invention does not comprise a kanamycin resistance gene.

### Fiber Gene

[0053] In some embodiments, an adenoviral helper plasmid of the present disclosure does not comprise a nucleotide sequence encoding adenoviral fiber protein. In some embodiments, an adenoviral helper plasmid does not comprise a nucleotide sequence encoding a full-length adenoviral fiber protein. In some embodiments, an adenoviral helper plasmid comprises a nucleotide sequence encoding a portion or fragment of adenoviral fiber protein. In some embodiments, an adenoviral helper plasmid comprises a nucleotide sequence that is at least 80%, 85%, 90%, 95%, 99%, or 100% identical to that of pXX6-80, excluding the nucleotide sequence encoding an adenoviral fiber protein.

### L1-52/55K (Packaging Protein 3) Gene

[0054] In some embodiments, an adenoviral helper plasmid of the present disclosure does not comprise a nucleotide sequence encoding a L1-52/55K (Packaging Protein 3) protein. In some embodiments, an adenoviral helper plasmid of the present invention does not comprise a nucleotide sequence encoding Peripentonal Hexon-Associated genes.

### L4 Region

[0055] In some embodiments, an adenoviral helper plasmid of the present disclosure comprises a complete L4 (hexon assembly) gene. In some embodiments, an adenoviral helper plasmid of the present disclosure comprises a nucleotide sequence encoding a complete L4 (hexon assembly). In some embodiments, an adenoviral helper plasmid of the present disclosure comprises a nucleotide sequence that is at least 80%, 85%, 90%, 95%, 99%, or 100% identical to SEQ ID NO: 3. In some embodiments, an adenoviral helper plasmid of the present disclosure comprises an amino acid sequence that is at least 80%, 85%, 90%, 95%, 99%, or 100% identical to SEQ ID NO: 4. In some embodiments, an adenoviral helper plasmid of the present invention comprises a complete L4 (33 kDa Ex2) gene. In some embodiments, an adenoviral helper plasmid of the present disclosure comprises a nucleotide sequence encoding a complete L4 (33 kDa Ex2). In some embodiments, an adenoviral helper plasmid of the present disclosure comprises a nucleotide sequence that is at least 80%, 85%, 90%, 95%, 99%, or 100% identical to SEQ ID NO: 5. In some embodiments, an adenoviral helper plasmid of the present disclosure comprises an amino acid sequence that is at least 80%, 85%, 90%, 95%, 99%, or 100% identical to SEQ ID NO: 6.

[0056] In some embodiments, an adenoviral helper plasmid of the present disclosure comprises a complete L4 Encapsidation Protein gene. In some embodiments, an adenoviral helper plasmid of the present disclosure comprises a nucleotide sequence encoding a complete L4 Encapsidation Protein. In some embodiments, an adenoviral helper plasmid of the present disclosure comprises a nucleotide sequence that is at least 80%, 85%, 90%, 95%, 99%, or 100% identical to SEQ ID NO: 7. In some embodiments, an adenoviral helper plasmid of the present disclosure comprises an amino acid sequence that is at least 80%, 85%, 90%, 95%, 99%, or 100% identical to SEQ ID NO: 8.

[0057] In some embodiments, an adenoviral helper plasmid of the present disclosure does not comprise an L4 (hexon assembly) gene. In some embodiments, an adenoviral helper plasmid does not comprise an L4 Encapsidation Protein gene. In some embodiments, an adenoviral helper plasmid does not comprise an L4 (hexon assembly) gene and does not comprise an L4 Encapsidation Protein gene. In some embodiments, an adenoviral helper plasmid of the present disclosure does not comprise a nucleotide sequence encoding L4 (hexon assembly). In some embodiments, an adenoviral helper plasmid does not comprise a nucleotide sequence encoding L4 Encapsidation Protein. In some embodiments, an adenoviral helper plasmid does not comprise a nucleotide sequence encoding L4 (hexon assembly) and does not comprise a nucleotide sequence encoding L4 Encapsidation Protein gene. In some embodiments, an adenoviral helper plasmid of the present disclosure comprises a nucleotide sequence encoding a fragment of L4 33 kDa Ex2. In some embodiments, an adenoviral helper plasmid of the present disclosure comprises a nucleotide sequence that is at least 80%, 85%, 90%, 95%, 99%, or 100% identical to SEQ ID NO: 9. In some embodiments, an adenoviral helper plasmid comprises a nucleotide sequence encoding a fragment of L4 33 kDa Ex2. In some embodiments, an adenoviral helper plasmid of the present disclosure comprises an amino acid sequence that is at least 80%, 85%, 90%, 95%, 99%, or 100% identical to SEQ ID NO: 10. In some embodiments, a nucleotide sequence encoding a fragment of L4 33 kDa Ex2 comprises an E2a promoter region (see, for example, Casper et al., “Identification of an adeno-associated virus Rep protein binding site in the adenovirus E2a promoter.” Journal of virology 79.1 (2005)). In some embodiments, an E2a promoter region has a nucleotide sequence that is at least 80%, 85%, 90%, 95%, 99%, or 100% identical to SEQ ID NO: 11. In some embodiments, an adenoviral helper plasmid does not comprise a nucleotide sequence encoding a fragment of L4 33 kDa Ex2. In some embodiments, an adenoviral helper plasmid does not comprise an E2a promoter region.

[0058] In some embodiments, an adenoviral helper plasmid of the present disclosure comprises a nucleotide sequence encoding a fragment of hexon-associated precursor (L4 pVIII). In some embodiments, an adenoviral helper plasmid comprises a nucleotide sequence that is at least 80%, 85%, 90%, 95%, 99%, or 100% identical to SEQ ID NO: 12. In some embodiments, an adenoviral helper plasmid comprises an amino acid sequence that is at least 80%, 85%, 90%, 95%, 99%, or 100% identical to SEQ ID NO: 13. In some embodiments, an adenoviral helper plasmid does not comprise a nucleotide sequence encoding hexon-associated precursor (L4 pVIII). In some embodiments, an adenoviral helper plasmid does not comprise a nucleotide sequence encoding a fragment of partial hexon-associated precursor (L4 pVIII).

### VA RNA Region

[0059] In some embodiments, an adenoviral helper plasmid of the present disclosure comprises a VA RNA region having a nucleotide sequence that is at least 80%, 85%, 90%, 95%, 99%, or 100% identical to SEQ ID NO: 14. In some embodiments, an adenoviral helper plasmid comprises a VA RNA region having a nucleotide sequence that is at least 80%, 85%, 90%, 95%, 99%, or 100% identical to SEQ ID NO: 15. In some embodiments, a VA RNA region comprises a VA RNAI gene having a sequence that is at least 80%, 85%, 90%, 95%, 99%, or 100% identical to SEQ ID NO: 16. In some embodiments, a VA RNA region comprises a VA RNAI gene having a sequence that is at least 80%, 85%, 90%, 95%, 99%, or 100% identical to SEQ ID NO: 17. In some embodiments, a VA RNA region comprises a VA RNAII gene having a sequence that is at least 80%, 85%, 90%, 95%, 99%, or 100% identical to SEQ ID NO: 18. In some embodiments, a VA RNA region comprises a VA RNAII gene having a sequence that is at least 80%, 85%, 90%, 95%, 99%, or 100% identical to SEQ ID NO: 19.

[0060] In some embodiments, an adenoviral helper plasmid of the present disclosure comprises a nucleotide sequence encoding a fragment of DNA Terminal Protein. In some embodiments, a nucleotide sequence encoding a fragment of DNA Terminal Protein is at least 80%, 85%, 90%, 95%, 99%, or 100% identical to SEQ ID NO: 20. In some embodiments, a fragment of DNA Terminal Protein has an amino acid sequence that is at least 80%, 85%, 90%, 95%, 99%, or 100% identical to SEQ ID NO: 21. In some embodiments, an adenoviral helper plasmid does not comprise a nucleotide sequence encoding DNA Terminal Protein. In some embodiments, an adenoviral helper plasmid comprises a nucleotide sequence encoding a fragment of 23 kDa endoprotease. In some embodiments, an adenoviral helper plasmid comprise a nucleotide sequence at least 80%, 85%, 90%, 95%, 99%, or 100% identical to SEQ ID NO: 22. In some embodiments, a fragment of 23 kDa endoprotease region has an amino acid sequence that is at least 80%, 85%, 90%, 95%, 99%, or 100% identical to SEQ ID NO: 23. In some embodiments, an adenoviral helper plasmid does not comprise a nucleotide sequence encoding 23 kDa endoprotease region.

### Introduction of Genes Encoding Supplementary Features

[0061] In some embodiments, an adenoviral helper plasmid of the present disclosure comprises an E2a gene. In some embodiments, an adenoviral helper plasmid of the present disclosure comprises a nucleotide sequence encoding E2a. In some embodiments, an adenoviral helper plasmid of the present disclosure comprises a nucleotide sequence that is at least 80%, 85%, 90%, 95%, 99%, or 100% identical to SEQ ID NO: 24. In some embodiments, an adenoviral helper plasmid of the present disclosure comprises an amino acid sequence that is at least 80%, 85%, 90%, 95%, 99%, or 100% identical to SEQ ID NO: 25. In some embodiments, expression of E2a is under the control of a promoter. In some embodiments, a nucleotide sequence encoding E2a is operably linked to a promoter. In some embodiments, a promoter is, for example, a CMV promoter, a PGK promoter, an SV40 promoter, an EF-1α promoter, a Ubc promoter, a CAG promoter, or a β-actin promoter. In some embodiments, a nucleotide sequence encoding E2a is operably linked to a transcriptional enhancer. In some embodiments, a transcriptional enhancer is, for example, a CMV enhancer. In some embodiments, a nucleotide sequence encoding E2a is operably linked to a regulatory intron. In some embodiments, expression of E2a is under the control of a chicken β-actin promoter. In some embodiments, a nucleotide sequence encoding E2a is operably linked to a chicken β-actin promoter. In some embodiments, a chicken β-actin promoter has a nucleotide sequence that is at least 80%, 85%, 90%, 95%, 99%, or 100% identical to SEQ ID NO: 26. In some embodiments, a chicken β-actin promoter is positioned upstream of a nucleotide sequence encoding E2a. In some embodiments, expression of E2a is under the control of an E2a promoter and a chicken β-actin promoter. In some embodiments, a nucleotide sequence encoding E2a is operably linked to an E2a promoter and a chicken β-actin promoter. In some embodiments, a chicken β-actin promoter is positioned upstream of an E2a promoter. In some embodiments, expression of E2a is under the control of chicken β-actin promoter and a CMV enhancer. In some embodiments, a nucleotide sequence encoding E2a is operably linked to a chicken β-actin promoter and a CMV enhancer. In some embodiments, a chicken β-actin promoter and a CMV enhancer are positioned upstream of an E2a promoter. In some embodiments, an adenoviral helper plasmid comprises an E2a polyadenylation signal. In some embodiments, an E2a polyadenylation signal is positioned downstream of a nucleotide sequence encoding E2a. In some embodiments, an E2a polyadenylation signal has a nucleotide sequence that is at least 80%, 85%, 90%, 95%, 99%, or 100% identical to SEQ ID NO: 27. In some embodiments, an adenoviral helper plasmid comprises an SV40 polyadenylation signal. In some embodiments, an SV40 polyadenylation signal is positioned downstream of a nucleotide sequence encoding E2a. In some embodiments, an SV40 polyadenylation signal is positioned downstream of an E2a polyadenylation signal. In some embodiments, an SV40 polyadenylation signal has a sequence that is at least 80%, 85%, 90%, 95%, 99%, or 100% identical to SEQ ID NO: 28.

[0062] In some embodiments, an adenoviral helper plasmid comprises a nucleotide sequence encoding UL30 derived from HSV-1. In some embodiments, a nucleotide sequence encoding UL30 has a nucleotide sequence that is at least 80%, 85%, 90%, 95%, 99%, or 100% identical to SEQ ID NO: 29. In some embodiments, an amino acid sequence UL30 is at least 80%, 85%, 90%, 95%, 99%, or 100% identical to SEQ ID NO: 30. In some embodiments, an adenoviral helper plasmid comprises a nucleotide sequence encoding UL42 derived from HSV-1. In some embodiments, a nucleotide sequence encoding UL42 has a nucleotide sequence that is at least 80%, 85%, 90%, 95%, 99%, or 100% identical to SEQ ID NO: 31. In some embodiments, an amino acid sequence of UL42 is at least 80%, 85%, 90%, 95%, 99%, or 100% identical to SEQ ID NO: 32. In some embodiments, an adenoviral helper plasmid comprises a nucleotide sequence encoding UL30 derived from HSV-1, and a nucleotide sequence encoding UL42 derived from HSV-1. In some embodiments, a nucleotide sequence encoding UL30 and a nucleotide sequence encoding UL42 are separated by a P2a cleavage site. In some embodiments, a P2a cleavage site has a nucleotide sequence that is at least 80%, 85%, 90%, 95%, 99%, or 100% identical to SEQ ID NO: 33. In some embodiments, a P2a cleavage site has an amino acid sequence that is at least 80%, 85%, 90%, 95%, 99%, or 100% identical to SEQ ID NO: 34. In some embodiments, expression of UL30 and/or UL42 gene is/are under the control of an EF-1α promoter. In some embodiments, a nucleotide sequence encoding UL30 is operably linked to a promoter. In some embodiments, a nucleotide sequence encoding UL30 is operably linked to a CMV promoter, a PGK promoter, an SV40 promoter, an EF-1α promoter, a Ubc promoter, a CAG promoter, or a β-actin promoter. In some embodiments, a nucleotide sequence encoding UL30 is operably linked to a transcriptional enhancer. In some embodiments, a transcriptional enhancer is, for example, a CMV enhancer. In some embodiments, a nucleotide sequence encoding UL30 is operably linked to a regulatory intron. In some embodiments a nucleotide sequence encoding UL42 and/or a nucleotide sequence encoding UL30 are operably linked to an EF-1α promoter. In some embodiments, an EF-1α promoter has a nucleotide sequence that is at least 80%, 85%, 90%, 95%, 99%, or 100% identical to SEQ ID NO: 35. In some embodiments, expression of UL30 and/or UL42 is/are under the control of an SV40 promoter. In some embodiments, a nucleotide sequence encoding UL42 and/or a nucleotide sequence encoding UL30 are operably linked to an SV40 promoter. In some embodiments, an SV40 promoter has a nucleotide sequence that is at least 80%, 85%, 90%, 95%, 99%, or 100% identical to SEQ ID NO: 68.

[0063] In some embodiments, an adenoviral helper plasmid comprises a polyadenylation signal. In some embodiments. a polyadenylation signal is a β-globin polyadenylation signal, SV40 polyadenylation signal, or a Bovine Growth Hormone (bGH) polyadenylation signal. In some embodiments, an adenoviral helper plasmid comprises a polyadenylation signal downstream of a nucleotide sequence encoding UL42. In some embodiments, an adenoviral helper plasmid comprises a β-globin polyadenylation signal downstream of a nucleotide sequence encoding UL42. In some embodiments, a β-globin polyadenylation signal has a sequence that is at least 80%, 85%, 90%, 95%, 99%, or 100% identical to SEQ ID NO: 36. In some embodiments, an adenoviral helper plasmid comprises a Bovine Growth Hormone (bGH) polyadenylation signal downstream of a nucleotide sequence encoding UL42. In some embodiments, a bGH polyadenylation signal has a sequence that is at least 80%, 85%, 90%, 95%, 99%, or 100% identical to SEQ ID NO: 69.

[0064] In some embodiments, an adenoviral helper plasmid comprises a nucleotide sequence encoding UL29 derived from HSV-1. In some embodiments, a nucleotide sequence encoding UL29 is at least 80%, 85%, 90%, 95%, 99%, or 100% identical to SEQ ID NO: 37. In some embodiments, an amino acid sequence of UL29 is at least 80%, 85%, 90%, 95%, 99%, or 100% identical to SEQ ID NO: 38. In some embodiments, a nucleotide sequence encoding UL29 is operably linked to a promoter. In some embodiments, a nucleotide sequence encoding UL30 is operably linked to a CMV promoter, a PGK promoter, an SV40 promoter, an EF-1α promoter, a Ubc promoter, a CAG promoter, or a β-actin promoter. In some embodiments, a nucleotide sequence encoding UL29 is operably linked to a transcriptional enhancer. In some embodiments, a transcriptional enhancer is, for example, a CMV enhancer. In some embodiments, a nucleotide sequence encoding UL29 is operably linked to a regulatory intron. In some embodiments, expression of UL29 is under the control of an HSV TK promoter. In some embodiments, a nucleotide sequence encoding UL29 is operably linked to an HSV TK promoter. In some embodiments, an HSV TK promoter has a nucleotide sequence that is at least 80%, 85%, 90%, 95%, 99%, or 100% identical to SEQ ID NO: 39.

[0065] In some embodiments, an adenoviral helper plasmid comprises a polyadenylation signal downstream of a nucleotide sequence encoding UL29. In some embodiments, a polyadenylation signal is a β-globin polyadenylation signal, SV40 polyadenylation signal, or a Bovine Growth Hormone (bGH) polyadenylation signal. In some embodiments, an adenoviral helper plasmid comprises an HSV TK polyadenylation signal downstream of a nucleotide sequence encoding UL29. In some embodiments, an HSV TK polyadenylation signal has a sequence that is at least 80%, 85%, 90%, 95%, 99%, or 100% identical to SEQ ID NO: 40.

### Exemplary Adenoviral Helper Plasmids

[0066] In some embodiments, an adenoviral helper plasmid of the present disclosure has a nucleotide sequence that is at least 80%, 85%, 90%, 95%, 99%, or 100% identical to SEQ ID NO: 41. In some embodiments, an adenoviral helper plasmid of the present disclosure comprises the following components having nucleotide sequences are at least 80%, 85%, 90%, 95%, 99%, or 100% identical to the indicated sequences: E4 mini promoter (SEQ ID NO: 1), L4 (Hexon Assembly) (SEQ ID NO: 3: SEQ ID NO: 4), L4 (33 kDa Ex2) (SEQ ID NO: 5; SEQ ID NO: 6), L4 Encapsidation Protein (22 kDa) (SEQ ID NO: 7; SEQ ID NO: 8), L4 pVIII Hexon-Associated Precursor (SEQ ID NO: 12; SEQ ID NO: 13), VA RNA region A (SEQ ID NO: 14), VA RNAI-A (SEQ ID NO: 16), VA RNAII-A (SEQ ID NO: 18), partial DNA Terminal Protein (SEQ ID NO: 20; SEQ ID NO: 21), 23 kDa endoprotease fragment region (SEQ ID NO: 22; SEQ ID NO: 23), and E2a (SEQ ID NO: 24; SEQ ID NO: 25), and does not comprise the following components: a fiber gene, an L1-52/55K (Packaging Protein 3) gene, and Peripentonal Hexon-Associated genes.

[0067] In some embodiments, an adenoviral helper plasmid of the present disclosure has a nucleotide sequence that is at least 80%, 85%, 90%, 95%, 99%, or 100% identical to SEQ ID NO: 42. In some embodiments, an adenoviral helper plasmid of the present disclosure comprises the following components having nucleotide sequences that are at least 80%, 85%, 90%, 95%, 99%, or 100% identical to the indicated sequences: E4 mini promoter (SEQ ID NO: 1), L4 (33 kDa Ex2) (SEQ ID NO: 9; SEQ ID NO: 10), VA RNA region A (SEQ ID NO: 14), VA RNAI-A (SEQ ID NO: 16), VA RNAII-A (SEQ ID NO: 18), partial DNA Terminal Protein (SEQ ID NO: 20; SEQ ID NO: 21), 23 kDa endoprotease fragment region (SEQ ID NO: 22; SEQ ID NO: 23), and E2a (SEQ ID NO: 24; SEQ ID NO: 25), and does not comprise or encode the following components: a fiber gene, an L1-52/55K (Packaging Protein 3) gene, Peripentonal Hexon-Associated genes, full-length L4 (Hexon Assembly) gene, L4 Encapsidation Protein, and L4 pVIII Hexon-Associated Precursor.

[0068] In some embodiments, an adenoviral helper plasmid of the present disclosure has a nucleotide sequence that is at least 80%, 85%, 90%, 95%, 99%, or 100% identical to SEQ ID NO: 43. In some embodiments, an adenoviral helper plasmid of the present disclosure comprises the following components having nucleotide sequences that are at least 80%, 85%, 90%, 95%, 99%, or 100% identical to the indicated sequences: E4 mini promoter (SEQ ID NO: 1), L4 (33 kDa Ex2) (SEQ ID NO: 9; SEQ ID NO: 10), VA RNA region B (SEQ ID NO: 15), VA RNAI-B (SEQ ID NO: 17), VA RNAII-B (SEQ ID NO: 19), and E2a (SEQ ID NO: 24; SEQ ID NO: 25), and does not comprise or encode the following components: a fiber gene, an L1-52/55K (Packaging Protein 3) gene, Peripentonal Hexon-Associated genes, full-length L4 (Hexon Assembly) gene, L4 Encapsidation Protein, L4 pVIII Hexon-Associated Precursor, DNA Terminal Protein, and 23 kDa endoprotease fragment region.

[0069] In some embodiments, an adenoviral helper plasmid of the present disclosure has a nucleotide sequence that is at least 80%, 85%, 90%, 95%, 99%, or 100% identical to SEQ ID NO: 44. In some embodiments, an adenoviral helper plasmid of the present disclosure comprises the following components having nucleotide sequences that are at least 80%, 85%, 90%, 95%, 99%, or 100% identical to the indicated sequences: E4 mini promoter (SEQ ID NO: 1), L4 (33 kDa Ex2) (SEQ ID NO: 9; SEQ ID NO: 10), VA RNA region B (SEQ ID NO: 15), VA RNAI-B (SEQ ID NO: 17), VA RNAII-B (SEQ ID NO: 19), E2a (SEQ ID NO: 24; SEQ ID NO: 25), and SV40 polyadenylation signal downstream of E2a (SEQ ID NO: 28), and does not comprise or encode the following components: a fiber gene, an L1-52/55K (Packaging Protein 3) gene, Peripentonal Hexon-Associated genes, full-length L4 (Hexon Assembly) gene, L4 Encapsidation Protein, L4 pVIII Hexon-Associated Precursor, DNA Terminal Protein, and 23 kDa endoprotease fragment region.

[0070] In some embodiments, an adenoviral helper plasmid of the present disclosure has a nucleotide sequence that is at least 80%, 85%, 90%, 95%, 99%, or 100% identical to SEQ ID NO: 45. In some embodiments, an adenoviral helper plasmid of the present disclosure comprises the following components having nucleotide sequences that are at least 80%, 85%, 90%, 95%, 99%, or 100% identical to the indicated sequences: E4 mini promoter (SEQ ID NO: 1), L4 (33 kDa Ex2) (SEQ ID NO: 9; SEQ ID NO: 10), VA RNA region A (SEQ ID NO: 14), VA RNAI-A (SEQ ID NO: 16), VA RNAII-A (SEQ ID NO: 18), partial DNA Terminal Protein (SEQ ID NO: 20; SEQ ID NO: 21), 23 kDa endoprotease fragment region (SEQ ID NO: 22; SEQ ID NO: 23), and E2a (SEQ ID NO: 24; SEQ ID NO: 25), and SV40 polyadenylation signal downstream of E4orf6 (SEQ ID NO: 67), and does not comprise or encode the following components: a fiber gene, an L1-52/55K (Packaging Protein 3) gene. Peripentonal Hexon-Associated genes, full-length L4 (Hexon Assembly) gene, L4 Encapsidation Protein, and L4 pVIII Hexon-Associated Precursor, and SV40 polyadenylation signal downstream of E2a.

[0071] In some embodiments, an adenoviral helper plasmid of the present disclosure has a nucleotide sequence that is at least 80%, 85%, 90%, 95%, 99%, or 100% identical to SEQ ID NO: 46. In some embodiments, an adenoviral helper plasmid of the present disclosure comprises the following components having nucleotide sequences that are at least 80%, 85%, 90%, 95%, 99%, or 100% identical to the indicated sequences: E4 mini promoter (SEQ ID NO: 1), L4 (33 kDa Ex2) (SEQ ID NO: 9; SEQ ID NO: 10), VA RNA region B (SEQ ID NO: 15), VA RNAI-B (SEQ ID NO: 17), VA RNAII-B (SEQ ID NO: 19), E2a (SEQ ID NO: 24; SEQ ID NO: 25), and SV40 polyadenylation signal downstream of E4orf6 (SEQ ID NO: 67), and does not comprise or encode the following components: a fiber gene, an L1-52/55K (Packaging Protein 3) gene, Peripentonal Hexon-Associated genes, full-length L4 (Hexon Assembly) gene, L4 Encapsidation Protein, L4 pVIII Hexon-Associated Precursor, DNA Terminal Protein, and 23 kDa endoprotease fragment region, and SV40 polyadenylation signal downstream of E2a.

[0072] In some embodiments, an adenoviral helper plasmid of the present disclosure has a nucleotide sequence that is at least 80%, 85%, 90%, 95%, 99%, or 100% identical to SEQ ID NO: 47. In some embodiments, an adenoviral helper plasmid of the present disclosure comprises the following components having nucleotide sequences that are at least 80%, 85%, 90%, 95%, 99%, or 100% identical to the indicated sequences: SV40 promoter upstream of E4 region (SEQ ID NO: 2), L4 (33 kDa Ex2) (SEQ ID NO: 9; SEQ ID NO: 10), VA RNA region A (SEQ ID NO: 14), VA RNAI-A (SEQ ID NO: 16), VA RNAII-A (SEQ ID NO: 18), partial DNA Terminal Protein (SEQ ID NO: 20; SEQ ID NO: 21), 23 kDa endoprotease fragment region (SEQ ID NO: 22; SEQ ID NO: 23), and E2a (SEQ ID NO: 24; SEQ ID NO: 25), and SV40 polyadenylation signal downstream of E4orf6 (SEQ ID NO: 67), and does not comprise the following components: a fiber gene, an L1-52/55K (Packaging Protein 3) gene, Peripentonal Hexon-Associated genes, full-length L4 (Hexon Assembly) gene, L4 Encapsidation Protein, and L4 pVIII Hexon-Associated Precursor, SV40 polyadenylation signal downstream of E2a, and E4 mini promoter upstream of E4 region.

[0073] In some embodiments, an adenoviral helper plasmid of the present disclosure has a nucleotide sequence that is at least 80%, 85%, 90%, 95%, 99%, or 100% identical to SEQ ID NO: 48. In some embodiments, an adenoviral helper plasmid of the present disclosure comprises the following components having nucleotide sequences that are at least 80%, 85%, 90%, 95%, 99%, or 100% identical to the indicated sequences: SV40 promoter upstream of E4 region (SEQ ID NO: 2), L4 (33 kDa Ex2) (SEQ ID NO: 9; SEQ ID NO: 10), VARNA region B (SEQ ID NO: 15) , VA RNAI-B (SEQ ID NO: 17), VA RNAII-B (SEQ ID NO: 19), E2a (SEQ ID NO: 24; SEQ ID NO: 25), and SV40 polyadenylation signal downstream of E4orf6 (SEQ ID NO: 67), and does not comprise or encode the following components: a fiber gene, an L1-52/55K (Packaging Protein 3) gene, Peripentonal Hexon-Associated genes, full-length L4 (Hexon Assembly) gene, L4 Encapsidation Protein, L4 pVIII Hexon-Associated Precursor, DNA Terminal Protein, and 23 kDa endoprotease fragment region, and SV40 polyadenylation signal downstream of E2a, and E4 mini promoter upstream of E4 region.

[0074] In some embodiments, an adenoviral helper plasmid of the present disclosure has a nucleotide sequence that is at least 80%, 85%, 90%, 95%, 99%, or 100% identical to SEQ ID NO: 49. In some embodiments, an adenoviral helper plasmid of the present disclosure comprises the following components having nucleotide sequences that are at least 80%, 85%, 90%, 95%, 99%, or 100% identical to the indicated sequences: E4 mini promoter (SEQ ID NO: 1), L4 (33 kDa Ex2) (SEQ ID NO: 9; SEQ ID NO: 10), VA RNA region A (SEQ ID NO: 14), VA RNAI-A (SEQ ID NO: 16), VA RNAII-A (SEQ ID NO: 18), partial DNA Terminal Protein (SEQ ID NO: 20; SEQ ID NO: 21), 23 kDa endoprotease fragment region (SEQ ID NO: 22; SEQ ID NO: 23), E2a (SEQ ID NO: 24; SEQ ID NO: 25), and a chicken β-actin promoter upstream of E2a, and does not comprise the following components: a fiber gene, an L1-52/55K (Packaging Protein 3) gene, Peripentonal Hexon-Associated genes, full-length L4 (Hexon Assembly) gene, L4 Encapsidation Protein, and L4 pVIII Hexon-Associated Precursor.

[0075] In some embodiments, an adenoviral helper plasmid of the present disclosure has a nucleotide sequence that is at least 80%, 85%, 90%, 95%, 99%, or 100% identical to SEQ ID NO: 50. In some embodiments, an adenoviral helper plasmid of the present disclosure comprises the following components having nucleotide sequences that are at least 80%, 85%, 90%, 95%, 99%, or 100% identical to the indicated sequences: E4 mini promoter (SEQ ID NO: 1), L4 (33 kDa Ex2) (SEQ ID NO: 9; SEQ ID NO: 10), VA RNA region B (SEQ ID NO: 15), VA RNAI-B (SEQ ID NO: 17), VA RNAII-B (SEQ ID NO: 19), E2a (SEQ ID NO: 24; SEQ ID NO: 25), and a chicken β-actin promoter upstream of E2a, and does not comprise or encode the following components: a fiber gene, an L1-52/55K (Packaging Protein 3) gene, Peripentonal Hexon-Associated genes, full-length L4 (Hexon Assembly) gene, L4 Encapsidation Protein, L4 pVIII Hexon-Associated Precursor, DNA Terminal Protein, and 23 kDa endoprotease fragment region.

[0076] In some embodiments, an adenoviral helper plasmid of the present disclosure has a nucleotide sequence that is at least 80%, 85%, 90%, 95%, 99%, or 100% identical to SEQ ID NO: 51. In some embodiments, an adenoviral helper plasmid of the present disclosure comprises the following components having nucleotide sequences that are at least 80%, 85%, 90%, 95%, 99%, or 100% identical to the indicated sequences: E4 mini promoter (SEQ ID NO: 1), L4 (33 kDa Ex2) (SEQ ID NO: 9; SEQ ID NO: 10), VA RNA region B (SEQ ID NO: 15), VA RNAI-B (SEQ ID NO: 17), VA RNAII-B (SEQ ID NO: 19), E2a (SEQ ID NO: 24; SEQ ID NO: 25), SV40 polyadenylation signal downstream of E2a (SEQ ID NO: 28), and a chicken β-actin promoter upstream of E2a, and does not comprise or encode the following components: a fiber gene, an L1-52/55K (Packaging Protein 3) gene, Peripentonal Hexon-Associated genes, full-length L4 (Hexon Assembly) gene, L4 Encapsidation Protein, L4 pVIII Hexon-Associated Precursor, DNA Terminal Protein, and 23 kDa endoprotease fragment region.

[0077] In some embodiments, an adenoviral helper plasmid of the present disclosure has a nucleotide sequence that is at least 80%, 85%, 90%, 95%, 99%, or 100% identical to SEQ ID NO: 52. In some embodiments, an adenoviral helper plasmid of the present disclosure comprises the following components having nucleotide sequences that are at least 80%, 85%, 90%, 95%, 99%, or 100% identical to the indicated sequences: E4 mini promoter (SEQ ID NO: 1), L4 (33 kDa Ex2) (SEQ ID NO: 9; SEQ ID NO: 10), VA RNA region A (SEQ ID NO: 14), VA RNAI-A (SEQ ID NO: 16), VA RNAII-A (SEQ ID NO: 18), partial DNA Terminal Protein (SEQ ID NO: 20; SEQ ID NO: 21), 23 kDa endoprotease fragment region (SEQ ID NO: 22; SEQ ID NO: 23), and E2a (SEQ ID NO: 24; SEQ ID NO: 25). SV40 polyadenylation signal downstream of E4orf6 (SEQ ID NO: 67), and a chicken β-actin promoter upstream of E2a, and does not comprise the following components: a fiber gene, an L1-52/55K (Packaging Protein 3) gene, Peripentonal Hexon-Associated genes, full-length L4 (Hexon Assembly) gene, L4 Encapsidation Protein, and L4 pVIII Hexon-Associated Precursor, and SV40 polyadenylation signal downstream of E2a.

[0078] In some embodiments, an adenoviral helper plasmid of the present disclosure has a nucleotide sequence that is at least 80%, 85%, 90%, 95%, 99%, or 100% identical to SEQ ID NO: 53. In some embodiments, an adenoviral helper plasmid of the present disclosure comprises the following components having nucleotide sequences that are at least 80%, 85%, 90%, 95%, 99%, or 100% identical to the indicated sequences: E4 mini promoter (SEQ ID NO: 1), L4 (33 kDa Ex2) (SEQ ID NO: 9; SEQ ID NO: 10), VA RNA region B (SEQ ID NO: 15), VA RNAI-B (SEQ ID NO: 17), VA RNAII-B (SEQ ID NO: 19), E2a (SEQ ID NO: 24; SEQ ID NO: 25), SV40 polyadenylation signal downstream of E4orf6 (SEQ ID NO: 67), and a chicken β-actin promoter upstream of E2a, and does not comprise or encode the following components: a fiber gene, an L1-52/55K (Packaging Protein 3) gene, Peripentonal Hexon-Associated genes, full-length L4 (Hexon Assembly) gene, L4 Encapsidation Protein, L4 pVIII Hexon-Associated Precursor, DNA Terminal Protein, and 23 kDa endoprotease fragment region, and SV40 polyadenylation signal downstream of E2a.

[0079] In some embodiments, an adenoviral helper plasmid of the present disclosure has a nucleotide sequence that is at least 80%, 85%, 90%, 95%, 99%, or 100% identical to SEQ ID NO: 54. In some embodiments, an adenoviral helper plasmid of the present disclosure comprises the following components having nucleotide sequences that are at least 80%, 85%, 90%, 95%, 99%, or 100% identical to the indicated sequences: SV40 promoter upstream of E4 region (SEQ ID NO: 2), L4 (33 kDa Ex2) (SEQ ID NO: 9; SEQ ID NO: 10), VA RNA region A (SEQ ID NO: 14), VA RNAI-A (SEQ ID NO: 16), VA RNAII-A (SEQ ID NO: 18), partial DNA Terminal Protein (SEQ ID NO: 20; SEQ ID NO: 21), 23 kDa endoprotease fragment region (SEQ ID NO: 22; SEQ ID NO: 23), and E2a (SEQ ID NO: 24; SEQ ID NO: 25), SV40 polyadenylation signal downstream of E4orf6 (SEQ ID NO: 67), and a chicken-actin promoter upstream of E2a, and does not comprise or encode the following components: a fiber gene, an L1-52/55K (Packaging Protein 3) gene, Peripentonal Hexon-Associated genes, full-length L4 (Hexon Assembly) gene, L4 Encapsidation Protein, and L4 pVIII Hexon-Associated Precursor, SV40 polyadenylation signal downstream of E2a, and E4 mini promoter upstream of E4 region.

[0080] In some embodiments, an adenoviral helper plasmid of the present disclosure has a nucleotide sequence that is at least 80%, 85%, 90%, 95%, 99%, or 100% identical to SEQ ID NO: 55. In some embodiments, an adenoviral helper plasmid of the present disclosure comprises the following components having nucleotide sequences that are at least 80%, 85%, 90%, 95%, 99%, or 100% identical to the indicated sequences: SV40 promoter upstream of E4 region (SEQ ID NO: 2), L4 (33 kDa Ex2) (SEQ ID NO: 9; SEQ ID NO: 10), VA RNA region B (SEQ ID NO: 15), VA RNAI-B (SEQ ID NO: 17), VA RNAII-B (SEQ ID NO: 19), E2a (SEQ ID NO: 24; SEQ ID NO: 25), SV40 polyadenylation signal downstream of E2a (SEQ ID NO: 28), SV40 polyadenylation signal downstream of E4orf6 (SEQ ID NO: 67), and a chicken β-actin promoter upstream of E2a, and does not comprise or encode the following components: a fiber gene, an L1-52/55K (Packaging Protein 3) gene, Peripentonal Hexon-Associated genes, full-length L4 (Hexon Assembly) gene, L4 Encapsidation Protein, L4 pVIII Hexon-Associated Precursor, DNA Terminal Protein, and 23 kDa endoprotease fragment region, and E4 mini promoter upstream of E4 region.

[0081] In some embodiments, an adenoviral helper plasmid of the present disclosure has a nucleotide sequence that is at least 80%, 85%, 90%, 95%, 99%, or 100% identical to SEQ ID NO: 56. In some embodiments, an adenoviral helper plasmid of the present disclosure comprises the following components having nucleotide sequences that are at least 80%, 85%, 90%, 95%, 99%, or 100% identical to the indicated sequences: SV40 promoter upstream of E4 region (SEQ ID NO: 2), L4 (33 kDa Ex2) (SEQ ID NO: 9; SEQ ID NO: 10), VA RNA region B (SEQ ID NO: 15), VA RNAI-B (SEQ ID NO: 17), VA RNAII-B (SEQ ID NO: 19), E2a (SEQ ID NO: 24; SEQ ID NO: 25), SV40 polyadenylation signal downstream of E2a (SEQ ID NO: 28), SV40 polyadenylation signal downstream of E4orf6 (SEQ ID NO: 67), and a chicken β-actin promoter upstream of E2a, and does not comprise or encode the following components: a fiber gene, an L1-52/55K (Packaging Protein 3) gene, Peripentonal Hexon-Associated genes, full-length L4 (Hexon Assembly) gene, L4 Encapsidation Protein, L4 pVIII Hexon-Associated Precursor, DNA Terminal Protein, and 23 kDa endoprotease fragment region, E4 mini promoter upstream of E4 region, a gene encoding E4orf1, a gene encoding E4orf2, and a gene encoding E4orf3.

[0082] In some embodiments, an adenoviral helper plasmid of the present disclosure has a nucleotide sequence that is at least 80%, 85%, 90%, 95%, 99%, or 100% identical to SEQ ID NO: 57. In some embodiments, an adenoviral helper plasmid of the present disclosure comprises the following components having nucleotide sequences that are at least 80%, 85%, 90%, 95%, 99%, or 100% identical to the indicated sequences: E4 mini promoter (SEQ ID NO: 1), L4 (33 kDa Ex2) (SEQ ID NO: 9; SEQ ID NO: 10), VA RNA region A (SEQ ID NO: 14), VA RNAI-A (SEQ ID NO: 16), VA RNAII-A (SEQ ID NO: 18), partial DNA Terminal Protein (SEQ ID NO: 20; SEQ ID NO: 21), 23 kDa endoprotease fragment region (SEQ ID NO: 22; SEQ ID NO: 23), E2a (SEQ ID NO: 24; SEQ ID NO: 25), a chicken β-actin promoter upstream of E2a, an HSV-1-derived UL30 gene (SEQ ID NO: 29; SEQ ID NO: 30), an HSV-1-derived UL42 gene (SEQ ID NO: 31; SEQ ID NO: 32), EF-1α promoter (SEQ ID NO: 35) upstream of UL30, and a β-globin polyadenylation signal (SEQ ID NO: 36) downstream of UL42, and does not comprise or encode the following components: a fiber gene, an L1-52/55K (Packaging Protein 3) gene, Peripentonal Hexon-Associated genes, full-length L4 (Hexon Assembly) gene, L4 Encapsidation Protein, and L4 pVIII Hexon-Associated Precursor.

[0083] In some embodiments, an adenoviral helper plasmid of the present disclosure has a nucleotide sequence that is at least 80%, 85%, 90%, 95%, 99%, or 100% identical to SEQ ID NO: 58. In some embodiments, an adenoviral helper plasmid of the present disclosure comprises the following components having nucleotide sequences that are at least 80%, 85%, 90%, 95%, 99%, or 100% identical to the indicated sequences: E4 mini promoter (SEQ ID NO: 1), L4 (33 kDa Ex2) (SEQ ID NO: 9; SEQ ID NO: 10), VA RNA region A (SEQ ID NO: 14), VA RNAI-A (SEQ ID NO: 16), VA RNAII-A (SEQ ID NO: 18), partial DNA Terminal Protein (SEQ ID NO: 20; SEQ ID NO: 21), 23 kDa endoprotease fragment region (SEQ ID NO: 22; SEQ ID NO: 23), E2a (SEQ ID NO: 24; SEQ ID NO: 25), a chicken β-actin promoter upstream of E2a, an HSV-1-derived UL30 gene (SEQ ID NO: 29; SEQ ID NO: 30), an HSV-1-derived UL42 gene (SEQ ID NO: 31; SEQ ID NO: 32), SV40 promoter (SEQ ID NO: 68) upstream of UL30, and a Bovine Growth Hormone (bGH) polyadenylation signal (SEQ ID NO: 69) downstream of UL42, and does not comprise or encode the following components: a fiber gene, an L1-52/55K (Packaging Protein 3) gene, Peripentonal Hexon-Associated genes, full-length L4 (Hexon Assembly) gene, L4 Encapsidation Protein, and L4 pVIII Hexon-Associated Precursor.

[0084] In some embodiments, an adenoviral helper plasmid of the present disclosure has a nucleotide sequence that is at least 80%, 85%, 90%, 95%, 99%, or 100% identical to SEQ ID NO: 59. In some embodiments, an adenoviral helper plasmid of the present disclosure comprises the following components having nucleotide sequences that are at least 80%, 85%, 90%, 95%, 99%, or 100% identical to the indicated sequences: E4 mini promoter (SEQ ID NO: 1), L4 (33 kDa Ex2) (SEQ ID NO: 9; SEQ ID NO: 10), VA RNA region B (SEQ ID NO: 15), VA RNAI-B (SEQ ID NO: 17), VA RNAII-B (SEQ ID NO: 19), E2a (SEQ ID NO: 24; SEQ ID NO: 25), a chicken β-actin promoter upstream of E2a, an HSV-1-derived UL30 gene (SEQ ID NO: 29; SEQ ID NO: 30), an HSV-1-derived UL42 gene (SEQ ID NO: 31; SEQ ID NO: 32), SV40 promoter (SEQ ID NO: 68) upstream of UL30, and a Bovine Growth Hormone (bGH) polyadenylation signal (SEQ ID NO: 69) downstream of UL42, and does not comprise or encode the following components: a fiber gene, an L1-52/55K (Packaging Protein 3) gene, Peripentonal Hexon-Associated genes, full-length L4 (Hexon Assembly) gene, L4 Encapsidation Protein, L4 pVIII Hexon-Associated Precursor, DNA Terminal Protein, and 23 kDa endoprotease fragment region.

[0085] In some embodiments, an adenoviral helper plasmid of the present disclosure has a nucleotide sequence that is at least 80%, 85%, 90%, 95%, 99%, or 100% identical to SEQ ID NO: 60. In some embodiments, an adenoviral helper plasmid of the present disclosure comprises the following components having nucleotide sequences that are at least 80%, 85%, 90%, 95%, 99%, or 100% identical to the indicated sequences: E4 mini promoter (SEQ ID NO: 1), L4 (33 kDa Ex2) (SEQ ID NO: 9; SEQ ID NO: 10), VA RNA region B (SEQ ID NO: 15), VA RNAI-B (SEQ ID NO: 17), VA RNAII-B (SEQ ID NO: 19), E2a (SEQ ID NO: 24; SEQ ID NO: 25), SV40 polyadenylation signal downstream of E2a (SEQ ID NO: 28), a chicken β-actin promoter upstream of E2a, an HSV-1-derived UL30 gene (SEQ ID NO: 29; SEQ ID NO: 30), an HSV-1-derived UL42 gene (SEQ ID NO: 31; SEQ ID NO: 32), SV40 promoter (SEQ ID NO: 68) upstream of UL30, and a Bovine Growth Hormone (bGH) polyadenylation signal (SEQ ID NO: 69) downstream of UL42, and does not comprise or encode the following components: a fiber gene, an L1-52/55K (Packaging Protein 3) gene, Peripentonal Hexon-Associated genes, full-length L4 (Hexon Assembly) gene, L4 Encapsidation Protein, L4 pVIII Hexon-Associated Precursor, DNA Terminal Protein, and 23 kDa endoprotease fragment region.

[0086] In some embodiments, an adenoviral helper plasmid of the present disclosure has a nucleotide sequence that is at least 80%, 85%, 90%, 95%, 99%, or 100% identical to SEQ ID NO: 61. In some embodiments, an adenoviral helper plasmid of the present disclosure comprises the following components having nucleotide sequences that are at least 80%, 85%, 90%, 95%, 99%, or 100% identical to the indicated sequences: E4 mini promoter (SEQ ID NO: 1), L4 (33 kDa Ex2) (SEQ ID NO: 9; SEQ ID NO: 10), VA RNA region A (SEQ ID NO: 14), VA RNAI-A (SEQ ID NO: 16), VA RNAII-A (SEQ ID NO: 18), partial DNA Terminal Protein (SEQ ID NO: 20; SEQ ID NO: 21), 23 kDa endoprotease fragment region (SEQ ID NO: 22; SEQ ID NO: 23), and E2a (SEQ ID NO: 24; SEQ ID NO: 25), SV40 polyadenylation signal downstream of E4orf6 (SEQ ID NO: 67), a chicken β-actin promoter upstream of E2a, an HSV-1-derived UL30 gene (SEQ ID NO: 29; SEQ ID NO: 30), an HSV-1-derived UL42 gene (SEQ ID NO: 31; SEQ ID NO: 32), SV40 promoter (SEQ ID NO: 68) upstream of UL30, and a Bovine Growth Hormone (bGH) polyadenylation signal (SEQ ID NO: 69) downstream of UL42, and does not comprise or encode the following components: a fiber gene, an L1-52/55K (Packaging Protein 3) gene, Peripentonal Hexon-Associated genes, full-length L4 (Hexon Assembly) gene, L4 Encapsidation Protein, and L4 pVIII Hexon-Associated Precursor, and SV40 polyadenylation signal downstream of E2a.

[0087] In some embodiments, an adenoviral helper plasmid of the present disclosure has a nucleotide sequence that is at least 80%, 85%, 90%, 95%, 99%, or 100% identical to SEQ ID NO: 62. In some embodiments, an adenoviral helper plasmid of the present disclosure comprises the following components having nucleotide sequences that are at least 80%, 85%, 90%, 95%, 99%, or 100% identical to the indicated sequences: E4 mini promoter (SEQ ID NO: 1). L4 (33 kDa Ex2) (SEQ ID NO: 9; SEQ ID NO: 10), VA RNA region B (SEQ ID NO: 15), VA RNAI-B (SEQ ID NO: 17), VA RNAII-B (SEQ ID NO: 19), E2a (SEQ ID NO: 24; SEQ ID NO: 25), SV40 polyadenylation signal downstream of E4orf6 (SEQ ID NO: 67), a chicken β-actin promoter upstream of E2a, an HSV-1-derived UL30 gene (SEQ ID NO: 29; SEQ ID NO: 30), an HSV-1-derived UL42 gene (SEQ ID NO: 31; SEQ ID NO: 32), SV40 promoter (SEQ ID NO: 68) upstream of UL30, and a Bovine Growth Hormone (bGH) polyadenylation signal (SEQ ID NO: 69) downstream of UL42, and does not comprise or encode the following components: a fiber gene, an L1-52/55K (Packaging Protein 3) gene, Peripentonal Hexon-Associated genes, full-length L4 (Hexon Assembly) gene, L4 Encapsidation Protein, L4 pVIII Hexon-Associated Precursor, DNA Terminal Protein, and 23 kDa endoprotease fragment region, and SV40 polyadenylation signal downstream of E2a.

[0088] In some embodiments, an adenoviral helper plasmid of the present disclosure has a nucleotide sequence that is at least 80%, 85%, 90%, 95%, 99%, or 100% identical to SEQ ID NO: 63. In some embodiments, an adenoviral helper plasmid of the present disclosure comprises the following components having nucleotide sequences that are at least 80%, 85%, 90%, 95%, 99%, or 100% identical to the indicated sequences: SV40 promoter upstream of E4 region (SEQ ID NO: 2), L4 (33 kDa Ex2) (SEQ ID NO: 9; SEQ ID NO: 10), VA RNA region A (SEQ ID NO: 14), VA RNAI-A (SEQ ID NO: 16), VA RNAII-A (SEQ ID NO: 18), partial DNA Terminal Protein (SEQ ID NO: 20; SEQ ID NO: 21), 23 kDa endoprotease fragment region (SEQ ID NO: 22; SEQ ID NO: 23), and E2a (SEQ ID NO: 24; SEQ ID NO: 25), SV40 polyadenylation signal downstream of E4orf6 (SEQ ID NO: 67), a chicken β-actin promoter upstream of E2a, an HSV-1-derived UL30 gene (SEQ ID NO: 29; SEQ ID NO: 30), an HSV-1-derived UL42 gene (SEQ ID NO: 31; SEQ ID NO: 32), SV40 promoter (SEQ ID NO: 68) upstream of UL30, and a Bovine Growth Hormone (bGH) polyadenylation signal (SEQ ID NO: 69) downstream of UL42, and does not comprise or encode the following components: a fiber gene, an L1-52/55K (Packaging Protein 3) gene. Peripentonal Hexon-Associated genes, full-length L4 (Hexon Assembly) gene, L4 Encapsidation Protein, and L4 pVIII Hexon-Associated Precursor, SV40 polyadenylation signal downstream of E2a, and E4 mini promoter upstream of E4 region.

[0089] In some embodiments, an adenoviral helper plasmid of the present disclosure has a nucleotide sequence that is at least 80%, 85%, 90%, 95%, 99%, or 100% identical to SEQ ID NO: 64. In some embodiments, an adenoviral helper plasmid of the present disclosure comprises the following components having nucleotide sequences that are at least 80%, 85%, 90%, 95%, 99%, or 100% identical to the indicated sequences: SV40 promoter upstream of E4 region (SEQ ID NO: 2), L4 (33 kDa Ex2) (SEQ ID NO: 9; SEQ ID NO: 10), VARNA region B (SEQ ID NO: 15), VA RNAI-B (SEQ ID NO: 17), VA RNAII-B (SEQ ID NO: 19), E2a (SEQ ID NO: 24; SEQ ID NO: 25), SV40 polyadenylation signal downstream of E2a (SEQ ID NO: 28), SV40 polyadenylation signal downstream of E4orf6 (SEQ ID NO: 67), a chicken β-actin promoter upstream of E2a, an HSV-1-derived UL30 gene (SEQ ID NO: 29; SEQ ID NO: 30), an HSV-1-derived UL42 gene (SEQ ID NO: 31; SEQ ID NO: 32), SV40 promoter (SEQ ID NO: 68) upstream of UL30, and a Bovine Growth Hormone (bGH) polyadenylation signal (SEQ ID NO: 69) downstream of UL42, and does not comprise or encode the following components: a fiber gene, an L1-52/55K (Packaging Protein 3) gene, Peripentonal Hexon-Associated genes, full-length L4 (Hexon Assembly) gene, L4 Encapsidation Protein, L4 pVIII Hexon-Associated Precursor, DNA Terminal Protein, and 23 kDa endoprotease fragment region, and E4 mini promoter upstream of E4 region.

[0090] In some embodiments, an adenoviral helper plasmid of the present disclosure has a nucleotide sequence that is at least 80%, 85%, 90%, 95%, 99%, or 100% identical to SEQ ID NO: 65. In some embodiments, an adenoviral helper plasmid of the present disclosure comprises the following components having nucleotide sequences that are at least 80%, 85%, 90%, 95%, 99%, or 100% identical to the indicated sequences: E4 mini promoter (SEQ ID NO: 1), L4 (33 kDa Ex2) (SEQ ID NO: 9; SEQ ID NO: 10), VA RNA region A (SEQ ID NO: 14), VA RNAI-A (SEQ ID NO: 16), VA RNAII-A (SEQ ID NO: 18), partial DNA Terminal Protein (SEQ ID NO: 20; SEQ ID NO: 21), 23 kDa endoprotease fragment region (SEQ ID NO: 22; SEQ ID NO: 23), E2a (SEQ ID NO: 24; SEQ ID NO: 25), a chicken β-actin promoter upstream of E2a, an HSV-1-derived UL29 gene (SEQ ID NO: 37; SEQ ID NO: 38), HSV TK promoter (SEQ ID NO: 39) upstream of UL29, and an HSV TK polyadenylation signal (SEQ ID NO: 40) downstream of UL29, and does not comprise or encode the following components: a fiber gene, an L1-52/55K (Packaging Protein 3) gene, Peripentonal Hexon-Associated genes, full-length L4 (Hexon Assembly) gene, L4 Encapsidation Protein, and L4 pVIII Hexon-Associated Precursor.

[0091] In some embodiments, an adenoviral helper plasmid of the present disclosure has a nucleotide sequence that is at least 80%, 85%, 90%, 95%, 99%, or 100% identical to SEQ ID NO: 66. In some embodiments, an adenoviral helper plasmid of the present disclosure comprises the following components having nucleotide sequences that are at least 80%, 85%, 90%, 95%, 99%, or 100% identical to the indicated sequences: SV40 promoter upstream of E4 region (SEQ ID NO: 2), VA RNA region B (SEQ ID NO: 15), VA RNAI-B (SEQ ID NO: 17), VA RNAII-B (SEQ ID NO: 19), E2a (SEQ ID NO: 24; SEQ ID NO: 25), SV40 polyadenylation signal downstream of E2a (SEQ ID NO: 28), SV40 polyadenylation signal downstream of E4orf6 (SEQ ID NO: 67), and a chicken β-actin promoter upstream of E2a, and does not comprise or encode the following components: a fiber gene, an L1-52/55K (Packaging Protein 3) gene, Peripentonal Hexon-Associated genes, full-length L4 (Hexon Assembly) gene, L4 Encapsidation Protein, L4 pVIII Hexon-Associated Precursor, L4 (33 kDa Ex2), DNA Terminal Protein, and 23 kDa endoprotease fragment region, E4 mini promoter upstream of E4 region, a gene encoding E4orf1, a gene encoding E4orf2, and a gene encoding E4orf3.

### Methods of Production

[0092] In some embodiments, an adenoviral helper plasmid of the present disclosure is useful in methods of producing rAAV. In some embodiments, rAAV is produced by transfection of a producer cell. In some embodiments, a producer cell is a mammalian cell. In some embodiments, a producer cell is a transformed mammalian cell. In some embodiments, a producer cell is a Vero, HeLa, HEK293, HEK293T cell or derivative thereof.

[0093] In some embodiments, a method of producing a rAAV comprises transfection of a producer cell with an AAV vector plasmid, an AAV Rep-Cap expressing plasmid, and an adenoviral helper plasmid. In some embodiments, an AAV vector plasmid comprises AAV inverted terminal repeats (ITRs) and a transgene of interest. In some embodiments, an adenoviral helper plasmid is any adenoviral helper plasmid described herein.

[0094] In some embodiments, a method of producing a rAAV comprises transfection of a producer cell stably expressing Rep-Cap. In some embodiments, a method of producing a rAAV comprises transfection of a producer cell stably expressing Rep-Cap with an AAV vector plasmid and an adenoviral helper plasmid. In some embodiments, an AAV vector plasmid comprises AAV inverted terminal repeats (ITRs) and a transgene of interest. In some embodiments, an adenoviral helper plasmid is any adenoviral helper plasmid described herein.

### EXEMPLIFICATION

[0095] The main purpose of the work described in this disclosure is to develop novel adenoviral helper plasmids for rAAV production that are smaller, contain fewer non-necessary adenoviral genes, and that function as well or better than the most commonly used adenoviral helper plasmids.

[0096] The plasmids provided in this disclosure were synthesized de novo, were sequence-verified, and were scaled up for use in large-scale rAAV manufacturing. Production of rAAV studies were performed to compare vector yields when using the provided plasmids versus other commercially available adenoviral helper plasmids. Vector quality and activity were also assessed from rAAV produced with the different adenoviral helper plasmids to confirm that rAAV produced with the provided plasmids is at least equivalent, if not superior in quality. Taken together, these following examples demonstrate that provided adenoviral helper plasmids generate rAAV of high yield and quality, in a potentially safer and more cost-effective design.

### Example 1: Exemplary Methods for the Production of rAAVs Using Adenoviral Helper Plasmids Described Herein

[0097] HEK293 cells were transfected with a control adenoviral helper plasmid (e.g., a commercially available plasmid, such as pALD-X80, or an adenoviral helper plasmid described in herein. The adenoviral helper plasmid was co-transfected along with pAAVrep2cap9 and pAAV-CMV-GFP plasmids using PEI transfection in order to generate AAV9/ssCMV-GFP. Four days post-transfection, the HEK293 cells were harvested via 0.5% Triton X-100 lysis and nuclease addition (to degrade RNA, cellular genomic DNA, and remaining plasmid DNA). After 3 hours of lysis/nuclease treatment, the cell lysate was sampled and submitted for qPCR titer analysis. Samples were treated with another nuclease, then EDTA and heat-treated, followed by qPCR of diluted samples to determine vector genome copy number per sample. As a metric of transfection efficiency, cells positive for GFP were quantified using fluorescence microscopy.

### Example 2: Adenoviral Helper Plasmid Lacking fiber, L1-52/55K, and Peripentonal Hexon-Associated Genes, and Having a Partial L4 Hexon-Associated Precursor

[0098] To reduce the size of the adenoviral helper plasmid, an adenoviral helper plasmid (pEMBR-1.2: SEQ ID NO: 41) was designed which lacks the fiber gene, the L1-52/55K (Packaging Protein 3) gene, and most of the Hexon Associated Precursor, as well as the Peripentonal Hexon-Associated protein. These deletions were made relative to commercially available helper plasmids, such as pXX6-80. The Adenoviral helper genes were synthesized and assembled into a kanamycin-resistant plasmid backbone. The resulting plasmid is approximately 6.7 kb smaller than pXX6-80.

[0099] The adenoviral helper plasmid described above enabled the production of AAV in HEK293 cells. No major difference in AAV vector yield was observed between cells transfected with pALD-X80, and cells transfected with pEMBR-1.2 as measured by qPCR (See FIG. 2). rAAV vector produced with pEMBR-1.2 produces a normal vector with the correct ratios of the VP proteins, as observed when assessing vector capsid purity by SDS-PAGE (See FIG. 3), and the correct size of packaged transgene, as observed when assessing vector transgene purity by alkaline gel electrophoresis (See FIG. 3). Further, pEMBR-1.2 enabled the production of a fully functional vector capable of transfecting cells. No difference was observed in the transfection of HEK293 cells to generate AAVRH.10/ssCMV-GFP produced with pALD-X80 or pEMBR-1.2 (See FIG. 4).

### Example 3: Adenoviral Helper Plasmid Lacking a Fiber Gene and Most of the L4 (Hexon Assembly) Gene

[0100] In order to further reduce the size of the adenoviral helper plasmid, an adenoviral helper plasmid was designed which lacks the fiber gene, the L1-52/55K (Packaging Protein 3) gene, and most of the Hexon Associated Precursor, as well as the Peripentonal Hexon-Associated protein (as in pEMBR-1.2—See Example 2), and which further lacks a complete L4 (Hexon Assembly) region (pEMBR-1.3: SEQ ID NO: 42; See FIG. 5). A small fragment of the L4 region containing the E2A promoter or partial L4 (33 kDa Ex2; SEQ ID NO: 9) is retained.

[0101] In order to further optimize pEMBR-1.3, the VA RNA region of pEMBR-1.3 was replaced with a VA RNA region derived from AAV-2 (VA RNA-B: SEQ ID NO: 15). This version is named pEMBR-1.3B (SEQ ID NO: 43; See FIG. 5). In this version, the AAV-2 VARNA I (SEQ ID NO: 17) and VA RNA II (SEQ ID NO: 19) sequences were synthesized (without flanking the DNA Terminal Protein or Endoprotease gene sequences) with flanking StuI and BsrGI sites, and this insert was cloned into pEMBR-1.3.

### Example 4: Adenoviral Helper Plasmid Lacking a Fiber Gene and L4 (Hexon Assembly) Gene, and Containing a Chicken β-Actin Promoter to Drive E2a Expression

[0102] In order to enhance the viral productivity of the pEMBR-1.3 plasmids, adenoviral helper plasmids were designed that contain the features of pEMBR-1.3, and that further includes a chicken β-actin promoter (SEQ ID NO: 26) upstream of the E2a gene in order to enhance expression of the E2a protein (pEMBR-1.4: SEQ ID NO: 49; See FIG. 6). The chicken β-actin promoter was added to account for enhancer elements in other portions of the L4 region that could have been lost through the removal of most of the L4 region. Further, it has been previously shown that E2A can be driven by an exogenous promoter (Gene Therapy. 1998. 5, 938-945) and (Journal of Virology. 2007. Vol. 81. No. 21. 11908-11916).

[0103] Another version of pEMBR-1.4 was constructed to include the AAV-2 derived VA RNA region, as in pEMBR-1.3B. This version is named pEMBR-1.4B (SEQ ID NO: 50; See FIG. 6).

[0104] Another version of pEMBR-1.4 was constructed to include an SV40 polyadenylation signal in order to further enhance the expression of E2A. This version is named pEMBR-1.4B2 (SEQ ID NO: 51).

### Example 5: Introduction of Supplementary Accessory Genes to Modified Adenoviral Helper Plasmids

[0105] In order to further promote AAV production using the disclosed adenoviral helper plasmids, several supplementary accessory genes were added to the minimalized plasmids while ensuring that the size of the plasmids does not exceed that of currently commercially available adenoviral helper plasmids (such as pALD-X80).

[0106] The pEMBR-1.5 (SEQ ID NO: 57; See FIG. 7) adenoviral helper plasmid was designed to include the features as described in pEMBR-1.4, with the addition of the HSV-1 DNA polymerase genes (UL30 and UL42) in order to enhance the replication of the AAV transgene, even when the cells are not in S phase. The UL30 and UL42 genes were designed to be made as a single transcript (driven by the EF-1α core promoter and terminated by rabbit β-globin polyadenylation signal), using a P2A cleavage site to separate the two HSV-1 polymerase proteins. Any number of promoters could be used, including CBA, CMV, PGK, etc. and any number of poly A sites could be used. Additional versions of pEMBR-1.5 (e.g., pEMBR-1.5A: SEQ ID NO: 58) were designed, in which the UL30 and UL42 genes are driven by the SV40 promoter instead of the EF-1α core promoter.

[0107] Similarly to the other “B” designs, additional versions of pEMBR-1.5B were constructed to include the smaller AAV-2-derived VA RNA I and II, without the flanking the DNA Terminal Protein or Endoprotease gene sequences (pEMBR-1.5B: SEQ ID NO: 59).

[0108] Similarly to other “B2” designs, additional versions of pEMBR-1.5B2 were constructed to include the SV40 polyadenylation signal for higher E2A expression (pEMBR-1.5B2: SEQ ID NO: 60).

### Example 6: Additional Introduction of Supplementary Accessory Genes to Modified Adenoviral Helper Plasmids

[0109] This Example further confirms that removal of adenoviral helper genes resulting in a smaller adenoviral helper plasmid enables addition of supplementary genes to further improve AAV quality and yield. Specifically, various pEMBR plasmids of various sizes and comprising various supplementary genes (e.g., UL30, UL42, etc.) were designed from pEMBR-1.2 and pEMBR-1.5a backbone plasmids and tested for the production of AAV.

[0110] The pEMBR-1.2B2 (SEQ ID NO: 94) adenoviral helper plasmid was designed to include “B2” designs comprising a SV40 poly A site to potentially increase expression of E2A and a synthesized sequence of a smaller VA region (contains Ad2 VA RNA I and VA RNA II) that does not contain the flanking Ad Terminal Protein nor Endoprotease gene sequences. This region was synthesized with flanking StuI and BsrGI sites and the insert was cloned into pEMBR-1.2 to make pEMBR-1.2B2.

[0111] The pEMBR-1.2B2C (SEQ ID NO: 95) adenoviral helper plasmid (See FIG. 8) was designed to include “B2” designs, as described above, and “C” designs comprising an added SV40 poly(A) tail after E4 ORF6 in the E4 region to increase expression of E4 genes. Compared to the pEMBR-1.2 vector, this region was synthesized to decrease the amount of backbone sequence to further decrease the size of the plasmid. This E4 region was synthesized with flanking PacI and NotI sites for cloning into pEMBR-1.2B2.

[0112] The pEMBR-1.2B2D (SEQ ID NO: 96) adenoviral helper plasmid (See FIG. 9) was designed to include “B2” designs, as described above, and “D” designs comprising an added SV40 poly(A) tail after E4 ORF6 and an added SV40 promoter in the E4 region to increase expression of E4 genes. Compared to the pEMBR-1.2 vector, this region was synthesized to decrease the amount of backbone sequence to further decrease the size of the plasmid. This E4 region was synthesized with flanking PacI and NotI sites for cloning into pEMBR-1.2B2.

[0113] Vector yields for AAV (e.g., AAV9) in clarified lysate as measured by qPCR are shown in FIGS. 17B and 18 with various pEMBR plasmids designed from the pEMBR-1.2 backbone. pEMBR-1.2B2, pEMBR-1.2B2C, and pEMBR-1.2B2D adenoviral helper plasmids resulted in comparable AAV production relative to pEMBR-1.2 plasmid. pEMBR-1.2B2, pEMBR-1.2B2C, and pEMBR-1.2B2D adenoviral helper plasmids resulted in comparable or higher AAV production relative to commercially available plasmid (e.g., pHelper).

[0114] The pEMBR-1.2C (SEQ ID: NO. 97) adenoviral helper plasmid was designed to include “C” designs, similarly to the other “C” designs as described above. Furthermore, the pEMBR-1.2D (SEQ ID: NO. 98) adenoviral helper plasmid was designed to include “D” designs, similarly to the other “D” designs as described above.

[0115] Vector yields for AAV (e.g., AAV9) in clarified lysate as measured by qPCR are shown in FIGS. 17A and 18 with various pEMBR plasmids designed from the pEMBR-1.2 backbone. pEMBR-1.2C and pEMBR-1.2D adenoviral helper plasmids resulted in comparable AAV production relative to pEMBR-1.2 plasmid. pEMBR-1.2C and pEMBR-1.2D adenoviral helper plasmids resulted in comparable or higher AAV production relative to commercially available plasmid (e.g., pHelper).

[0116] The pEMBR-1.5A (SEQ ID NO: 58) adenoviral helper plasmid (See FIG. 10) was designed, as described in Example 5. pEMBR-1.5A comprises added HSV-1 DNA polymerase genes (UL30 and UL42) to the pEMBR-1.4 plasmid (no hexon assembly, exogenous promoter for E2a+a nucleotide sequence encoding a fragment of L4 33 kDa Ex2 which comprises an E2a promoter region. The HSV-1 DNA polymerase genes (UL30 and UL42) were added back to the pEMBR-1.5A plasmid to help replicate the AAV transgene, even when cells are not in S phase. The UL30 and UL40 genes were designed to be made as a single transcript (driven by SV40 promoter and terminated by bovine Growth Hormone polyA), using a P2A cleavage site to separate the two HSV-1 polymerase proteins. Any number of promoters could be used, including CBA, CMV, PGK, etc. and any number of poly A sites could be used.

[0117] Seeing as both pEMBR-1.5A and pEMBR-1.4 produced AAV at a substantially lower titer relative to pEMBR-1.2 (See FIGS. 17A and B), it was reasoned that pEMBR-1.5A (essentially pEMBR-1.4 with the UL30 and UL42 expression cassette added) produced AAV at a substantially lower titer because the plasmid backbone was derived from pEMBR-1.4. Thus, the UL30 and UL42 constructs were cloned into other plasmid versions that produce AAV at a relatively higher titer in order to test how the addition of UL30 and UL42 can influence AAV titer.

[0118] The pEMBR-1.55B2 (SEQ ID NO: 99) adenoviral helper plasmid (See FIG. 11) was generated by cloning the UL30 and UL42 expression cassette from the pEMBR-1.5A plasmid into the pEMBR-1.2B2 backbone. The UL30 and UL42 region was digested with the blunt cutters XmnI and PmeI from pEMBR-1.5A and cloned into pEMBR-1.2B2 at the blunted NdeI restriction site. The UL30 and UL42 genes were designed to be made as a single transcript (driven by SV40 promoter and terminated by bovine Growth Hormone polyA), using a P2A cleavage site to separate the two HSV-1 polymerase proteins. Although the direction in which the construct is cloned into the plasmid should theoretically not affect expression because this region contains both promoter and poly A signal which induces expression of UL30 and UL42 independent from the rest of the plasmid, opposite orientation versions were designed. The pEMBR-1.2B2 backbone, like other B2 version plasmids, includes “B2” designs, as described above.

[0119] The pEMBR-1.55B2 OO (SEQ ID NO: 100) adenoviral helper plasmid (See FIG. 12) is essentially the same plasmid as the 1.55B2 plasmid, but the UL30 and UL42 construct was cloned into pEMBR-1.55B2-OO in the opposite orientation (OO).

[0120] The pEMBR-1.55B2C (SEQ ID NO: 101) adenoviral helper plasmid (See FIG. 13) was generated by cloning the UL30 and UL42 expression cassette from the pEMBR-1.5A plasmid into the pEMBR-1.2B2 backbone. The UL30 and UL42 region was digested with the blunt cutters XmnI and PmeI from pEMBR-1.5A and cloned into pEMBR-1.2B2C at the blunted NdeI restriction site. The UL30 and UL42 genes were designed to be made as a single transcript (driven by SV40 promoter and terminated by bovine Growth Hormone polyA), using a P2A cleavage site to separate the two HSV-1 polymerase proteins. Although the direction in which the construct is cloned into the plasmid should theoretically not affect expression because this region contains both promoter and poly A signal which induces expression of UL30 and UL42 independent from the rest of the plasmid, opposite orientation versions were designed. The pEMBR-1.2B2C backbone, like other B2C version plasmids, includes “B2” and “C” designs, as described above.

[0121] The pEMBR-1.55B2C OO (SEQ ID NO: 102) adenoviral helper plasmid (See FIG. 14) is essentially the same plasmid as the 1.55B2C plasmid, but the UL30 and UL42 construct was cloned into pEMBR-1.55B2C-OO in the opposite orientation (OO).

[0122] The pEMBR-1.55B2D (SEQ ID NO: 103) adenoviral helper plasmid (See FIG. 15) was generated by cloning the UL30 and UL42 expression cassette from the pEMBR-1.5A plasmid into the pEMBR-1.2B2 backbone. The UL30 and UL42 region was digested with the blunt cutters XmnI and PmeI from pEMBR-1.5A and cloned into pEMBR-1.2B2 at the blunted NdeI restriction site. The UL30 and UL42 genes were designed to be made as a single transcript (driven by SV40 promoter and terminated by bovine Growth Hormone polyA), using a P2A cleavage site to separate the two HSV-1 polymerase proteins. Although the direction in which the construct is cloned into the plasmid should theoretically not affect expression because this region contains both promoter and polyA signal which induces expression of UL30 and UL42 independent from the rest of the plasmid, opposite orientation versions were designed. The pEMBR-1.2B2D backbone, like other B2D version plasmids, includes “B2” and “D” designs, as described above.

[0123] The pEMBR-1.55B2D OO (SEQ ID NO: 104) adenoviral helper plasmid (See FIG. 16) is essentially the same plasmid as the 1.55B2D plasmid, but the UL30 and UL42 construct was cloned into pEMBR-1.55B2D-OO in the opposite orientation (OO).

[0124] Vector yields for AAV (e.g., AAV9) in clarified lysate as measured by qPCR are shown in FIG. 17C with various pEMBR plasmids designed with the pEMBR-1.5A UL30 and UL42 expression cassette. pEMBR-1.55B2, pEMBR-1.55B2C, and pEMBR-1.55B2D adenoviral helper plasmids resulted in higher AAV production relative to pEMBR-1.5A plasmid. pEMBR-1.55B2, pEMBR-1.55B2C, and pEMBR-1.55B2D adenoviral helper plasmids resulted in comparable or higher AAV production relative to pEMBR-1.2 plasmid.

### Example 7: Table of Sequences

[0125] The below Table of Sequences lists and describes the various sequences discussed herein. Unless stated otherwise, all sequences are recited with 5′ to 3′ directionality of the positive strand of a plasmid. This directionality is preserved irrespective of the orientation of a gene or element described to be associated with a sequence. Asterisks as used herein indicate a stop codon.

### Equivalents

[0126] Those skilled in the art will recognize, or be able to ascertain using no more than routine experimentation, many equivalents to the specific embodiments of the invention described herein. The scope of the present invention is not intended to be limited to the above Description, but rather is as set forth in the following claims:

The application's sequence listing, which the Patent Office published only in electronic form, follows.

SEQUENCE LISTING (106 sequences)

SEQ ID NO: 1 - DNA, 239 bp, Artificial Sequence
  Description of Artificial Sequence: Synthetic polynucleotide
cccttttgccttcactgctaaactccttcaacacccaaaaaaccgaaagcaaagacccgcatccaagcgcacgccaaaagacccacaaaaaacacctgaaattggcaatgcagtaaaaaatcaggatatatatgagcgagacgtgaaccgggaaaaaatgtgacactgactaactcgaccacggcacagctcaccacaaaaaaattatccaaaagaaaaaatgaccattccgactgaca

SEQ ID NO: 2 - DNA, 330 bp, Artificial Sequence
  Description of Artificial Sequence: Synthetic polynucleotide
cacacagtcaatcccacacctttcaggggtccgaggggtcgtccgtcttcatacgtttcgtacgtagagttaatcagtcgttggtccacacctttcaggggtccgaggggtcgtccgtcttcatacgtttcgtacgtagagttaatcagtcgttggtatcagggcggggattgaggcgggtagggcggggattgaggcgggtcaaggcgggtaagaggcggggtaccgactgattaaaaaaaataaatacgtctccggctccggcggagccggagactcgataaggtcttcatcactcctccgaaaaaacctccggatccgaaaacgttt

SEQ ID NO: 3 - DNA, 3006 bp, Artificial Sequence
  Description of Artificial Sequence: Synthetic polynucleotide
atgcccttctcccacgcagacacgatcggcacactcagcgggttcatcaccgtaatttcactttccgcttcgctgggctcttcctcttcctcttgcgtccgcataccacgcgccactgggtcgtcttcattcagccgccgcactgtgcgcttacctcctttgccatgcttgattagcaccggtgggttgctgaaacccaccatttgtagcgccacatcttctctttcttcctcgctgtccacgattacctctggtgatggcgggcgctcgggcttgggagaagggcgcttctttttcttcttgggcgcaatggccaaatccgccgccgaggtcgatggccgcgggctgggtgtgcgcggcaccagcgcgtcttgtgatgagtcttcctcgtcctcggactcgatacgccgcctcatccgcttttttgggggcgcccggggaggcggcggcgacggggacggggacgacacgtcctccatggttgggggacgtcgcgccgcaccgcgtccgcgctcgggggtggtttcgcgctgctcctcttcccgactggccatttccttctcctataggcagaaaaagatcatggagtcagtcgagaagaaggacagcctaaccgccccctctgagttcgccaccaccgcctccaccgatgccgccaacgcgcctaccaccttccccgtcgaggcacccccgcttgaggaggaggaagtgattatcgagcaggacccaggttttgtaagcgaagacgacgaggaccgctcagtaccaacagaggataaaaagcaagaccaggacaacgcagaggcaaacgaggaacaagtcgggcggggggacgaaaggcatggcgactacctagatgtgggagacgacgtgctgttgaagcatctgcagcgccagtgcgccattatctgcgacgcgttgcaagagcgcagcgatgtgcccctcgccatagcggatgtcagccttgcctacgaacgccacctattctcaccgcgcgtaccccccaaacgccaagaaaacggcacatgcgagcccaacccgcgcctcaacttctaccccgtatttgccgtgccagaggtgcttgccacctatcacatctttttccaaaactgcaagatacccctatcctgccgtgccaaccgcagccgagcggacaagcagctggccttgcggcagggcgctgtcatacctgatatcgcctcgctcaacgaagtgccaaaaatctttgagggtcttggacgcgacgagaagcgcgcggcaaacgctctgcaacaggaaaacagcgaaaatgaaagtcactctggagtgttggtggaactcgagggtgacaacgcgcgcctagccgtactaaaacgcagcatcgaggtcacccactttgcctacccggcacttaacctaccccccaaggtcatgagcacagtcatgagtgagctgatcgtgcgccgtgcgcagcccctggagagggatgcaaatttgcaagaacaaacagaggagggcctacccgcagttggcgacgagcagctagcgcgctggcttcaaacgcgcgagcctgccgacttggaggagcgacgcaaactaatgatggccgcagtgctcgttaccgtggagcttgagtgcatgcagcggttctttgctgacccggagatgcagcgcaagctagaggaaacattgcactacacctttcgacagggctacgtacgccaggcctgcaagatctccaacgtggagctctgcaacctggtctcctaccttggaattttgcacgaaaaccgccttgggcaaaacgtgcttcattccacgctcaagggcgaggcgcgccgcgactacgtccgcgactgcgtttacttatttctatgctacacctggcagacggccatgggcgtttggcagcagtgcttggaggagtgcaacctcaaggagctgcagaaactgctaaagcaaaacttgaaggacctatggacggccttcaacgagcgctccgtggccgcgcacctggcggacatcattttccccgaacgcctgcttaaaaccctgcaacagggtctgccagacttcaccagtcaaagcatgttgcagaactttaggaactttatcctagagcgctcaggaatcttgcccgccacctgctgtgcacttcctagcgactttgtgcccattaagtaccgcgaatgccctccgccgctttggggccactgctaccttctgcagctagccaactaccttgcctaccactctgacataatggaagacgtgagcggtgacggtctactggagtgtcactgtcgctgcaacctatgcaccccgcaccgctccctggtttgcaattcgcagctgcttaacgaaagtcaaattatcggtacctttgagctgcagggtccctcgcctgacgaaaagtccgcggctccggggttgaaactcactccggggctgtggacgtcggcttaccttcgcaaatttgtacctgaggactaccacgcccacgagattaggttctacgaagaccaatcccgcccgcctaatgcggagcttaccgcctgcgtcattacccagggccacattcttggccaattgcaagccatcaacaaagcccgccaagagtttctgctacgaaagggacggggggtttacttggacccccagtccggcgaggagctcaacccaatccccccgccgccgcagccctatcagcagcagccgcgggcccttgcttcccaggatggcacccaaaaagaagctgcagctgccgccgccacccacggacgaggaggaatactgggacagtcaggcagaggaggttttggacgaggaggaggaggacatgatggaagactgggagagcctagacgaggaagcttccgaggtcgaagaggtgtcagacgaaacaccgtcaccctcggtcgcattcccctcgccggcgccccagaaatcggcaaccggttccagcatggctacaacctccgctcctcaggcgccgccggcactgcccgttcgccgacccaaccgtag

SEQ ID NO: 4 - protein, 1001 aa, Artificial Sequence
  Description of Artificial Sequence: Synthetic polypeptide
MPFSHADTIGTLSGFITVISLSASLGSSSSSCVRIPRATGSSSFSRRTVRLPPLPCLISTGGLLKPTICSATSSLSSSLSTITSGDGGRSGLGEGRFFFFLGAMAKSAAEVDGRGLGVRGTSASCDESSSSSDSIRRLIRFFGGARGGGGDGDGDDTSSMVGGRRAAPRPRSGVVSRCSSSRLAISFSYRQKKIMESVEKKDSLTAPSEFATTASTDAANAPTTFPVEAPPLEEEEVIIEQDPGFVSEDDEDRSVPTEDKKQDQDNAEANEEQVGRGDERHGDYLDVGDDVLLKHLQRQCAIICDALQERSDVPLAIADVSLAYERHLFSPRVPPKRQENGTCEPNPRLNFYPVFAVPEVLATYHIFFQNCKIPLSCRANRSRADKQLALRQGAVIPDIASLNEVPKIFEGLGRDEKRAANALQQENSENESHSGVLVELEGDNARLAVLKRSIEVTHFAYPALNLPPKVMSTVMSELIVRRAQPLERDANLQEQTEEGLPAVGDEQLARWLQTREPADLEERRKLMMAAVLVTVELECMQRFFADPEMQRKLEETLHYTFRQGYVRQACKISNVELCNLVSYLGILHENRLGQNVLHSTLKGEARRDYVRDCVYLFLCYTWQTAMGVWQQCLEECNLKELQKLLKQNLKDLWTAFNERSVAAHLADIIFPERLLKTLQQGLPDFTSQSMLQNFRNFILERSGILPATCCALPSDFVPIKYRECPPPLWGHCYLLQLANYLAYHSDIMEDVSGDGLLECHCRCNLCTPHRSLVCNSQLLNESQIIGTFELQGPSPDEKSAAPGLKLTPGLWTSAYLRKFVPEDYHAHEIRFYEDQSRPPNAELTACVITQGHILGQLQAINKARQEFLLRKGRGVYLDPQSGEELNPIPPPPQPYQQQPRALASQDGTQKEAAAAAATHGRGGILGQSGRGGFGRGGGGHDGRLGEPRRGSFRGRRGVRRNTVTLGRIPLAGAPEIGNRFQHGYNLRSSGAAGTARSPTQP

SEQ ID NO: 5 - DNA, 369 bp, Artificial Sequence
  Description of Artificial Sequence: Synthetic polynucleotide
gcccatactgcaccggcggcagcggcagcaacagcagcggccacacagaagcaaaggcgaccggatagcaagactctgacaaagcccaagaaatccacagcggcggcagcagcaggaggaggagcgctgcgtctggcgcccaacgaacccgtatcgacccgcgagcttagaaacaggatttttcccactctgtatgctatatttcaacagagcaggggccaagaacaagagctgaaaataaaaaacaggtctctgcgatccctcacccgcagctgcctgtatcacaaaagcgaagatcagcttcggcgcacgctggaagacgcggaggctctcttcagtaaatactgcgcgctgactcttaaggactag

SEQ ID NO: 6 - protein, 122 aa, Artificial Sequence
  Description of Artificial Sequence: Synthetic polypeptide
AHTAPAAAAATAAATQKQRRPDSKTLTKPKKSTAAAAAGGGALRLAPNEPVSTRELRNRIFPTLYAIFQQSRGQEQELKIKNRSLRSLTRSCLYHKSEDQLRRTLEDAEALFSKYCALTLKD

SEQ ID NO: 7 - DNA, 585 bp, Artificial Sequence
  Description of Artificial Sequence: Synthetic polynucleotide
atggcacccaaaaagaagctgcagctgccgccgccacccacggacgaggaggaatactgggacagtcaggcagaggaggttttggacgaggaggaggaggacatgatggaagactgggagagcctagacgaggaagcttccgaggtcgaagaggtgtcagacgaaacaccgtcaccctcggtcgcattcccctcgccggcgccccagaaatcggcaaccggttccagcatggctacaacctccgctcctcaggcgccgccggcactgcccgttcgccgacccaaccgtagatgggacaccactggaaccagggccggtaagtccaagcagccgccgccgttagcccaagagcaacaacagcgccaaggctaccgctcatggcgcgggcacaagaacgccatagttgcttgcttgcaagactgtgggggcaacatctccttcgcccgccgctttcttctctaccatcacggcgtggccttcccccgtaacatcctgcattactaccgtcatctctacagcccatactgcaccggcggcagcggcagcaacagcagcggccacacagaagcaaaggcgaccggatag

SEQ ID NO: 8 - protein, 194 aa, Artificial Sequence
  Description of Artificial Sequence: Synthetic polypeptide
MAPKKKLQLPPPPTDEEEYWDSQAEEVLDEEEEDMMEDWESLDEEASEVEEVSDETPSPSVAFPSPAPQKSATGSSMATTSAPQAPPALPVRRPNRRWDTTGTRAGKSKQPPPLAQEQQQRQGYRSWRGHKNAIVACLQDCGGNISFARRFLLYHHGVAFPRNILHYYRHLYSPYCTGGSGSNSSGHTEAKATG

SEQ ID NO: 9 - DNA, 87 bp, Artificial Sequence
  Description of Artificial Sequence: Synthetic oligonucleotide
cacaaaagcgaagatcagcttcggcgcacgctggaagacgcggaggctctcttcagtaaatactgcgcgctgactcttaaggactag

SEQ ID NO: 10 - protein, 28 aa, Artificial Sequence
  Description of Artificial Sequence: Synthetic peptide
HKSEDQLRRTLEDAEALFSKYCALTLKD

SEQ ID NO: 11 - DNA, 36 bp, Artificial Sequence
  Description of Artificial Sequence: Synthetic oligonucleotide
attctcagtcgcgcgtcataaatgacttctctcgga

SEQ ID NO: 12 - DNA, 110 bp, Artificial Sequence
  Description of Artificial Sequence: Synthetic polynucleotide
atgagcaaggaaattcccacgccctacatgtggagttaccagccacaaatgggacttgcggctggagctgcccaagactactcaacccgaataaactacatgagcgcggg

SEQ ID NO: 13 - protein, 36 aa, Artificial Sequence
  Description of Artificial Sequence: Synthetic polypeptide
MSKEIPTPYMWSYQPQMGLAAGAAQDYSTRINYMSA

SEQ ID NO: 14 - DNA, 513 bp, Artificial Sequence
  Description of Artificial Sequence: Synthetic polynucleotide
tatccgtagatgtacctggacatccaggtgatgccggcggcggtggtggaggcgcgcggaaagtcgcggacgcggttccagatgttgcgcagcggcaaaaagtgctccatggtcgggacgctctggccggtcaggcgcgcgcaatcgttgacgctctagcgtgcaaaaggagagcctgtaagcgggcactcttccgtggtctggtggataaattcgcaagggtatcatggcggacgaccggggttcgagccccgtatccggccgtccgccgtgatccatgcggttaccgcccgcgtgtcgaacccaggtgtgcgacgtcagacaacgggggagtgctccttttggcttccttccaggcgcggcggctgctgcgctagcttttttggccactggccgcgcgcagcgtaagcggttaggctggaaagcgaaagcattaagtggctcgctccctgtagccggagggttattttccaagggttgagtcgcgggacccccggttcgagtctcggaccg

SEQ ID NO: 15 - DNA, 730 bp, Artificial Sequence
  Description of Artificial Sequence: Synthetic polynucleotide
atccgtagatgtacctggacatccaggtgatgccggcggcggtggtggaggcgcgcggaaagtcgcggacgcggttccagatgttgcgcagcggcaaaaagtgctccatggtcgggacgctctggccggtgaggcgtgcgcagtcgttgacgctctagaccgtgcaaaaggagagcctgtaagcgggcactcttccgtggtctggtggataaattcgcaagggtatcatggcggacgaccggggttcgaaccccggatccggccgtccgccgtgatccatgcggttaccgcccgcgtgtcgaacccaggtgtgcgacgtcagacaacgggggagcgctccttttggcttccttccaggcgcggcggctgctgcgctagcttttttggccactggccgcgcgcggcgtaagcggttaggctggaaagcgaaagcattaagtggctcgctccctgtagccggagggttattttccaagggttgagtcgcaggacccccggttcgagtctcgggccggccggactgcggcgaacgggggtttgcctccccgtcatgcaagaccccgcttgcaaattcctccggaaacagggacgagccccttttttgcttttcccagatgcatccggtgctgcggcagatgcgcccccctcctcagcagcggcaagagcaagagcagcggcagacatgcagggcaccctccccttctcctaccgcgtcaggaggggcaacatc

SEQ ID NO: 16 - DNA, 163 bp, Artificial Sequence
  Description of Artificial Sequence: Synthetic polynucleotide
agcgggcactcttccgtggtctggtggataaattcgcaagggtatcatggcggacgaccggggttcgagccccgtatccggccgtccgccgtgatccatgcggttaccgcccgcgtgtcgaacccaggtgtgcgacgtcagacaacgggggagtgctcctttt

SEQ ID NO: 17 - DNA, 163 bp, Artificial Sequence
  Description of Artificial Sequence: Synthetic polynucleotide
agcgggcactcttccgtggtctggtggataaattcgcaagggtatcatggcggacgaccggggttcgaaccccggatccggccgtccgccgtgatccatgcggttaccgcccgcgtgtcgaacccaggtgtgcgacgtcagacaacgggggagcgctcctttt

SEQ ID NO: 18 - DNA, 74 bp, Artificial Sequence
  Description of Artificial Sequence: Synthetic oligonucleotide
ggctcgctccctgtagccggagggttattttccaagggttgagtcgcgggacccccggttcgagtctcggaccg

SEQ ID NO: 19 - DNA, 161 bp, Artificial Sequence
  Description of Artificial Sequence: Synthetic polynucleotide
ggctcgctccctgtagccggagggttattttccaagggttgagtcgcaggacccccggttcgagtctcgggccggccggactgcggcgaacgggggtttgcctccccgtcatgcaagaccccgcttgcaaattcctccggaaacagggacgagcccctttt

SEQ ID NO: 20 - DNA, 699 bp, Artificial Sequence
  Description of Artificial Sequence: Synthetic polynucleotide
tacctcgtgaaaaacggcgacgcgttgtagaccttggcgcaggcgctgaaaggcgcgcggaggtggtggcggcggccgtagtggacctacaggtccatgtagatgcctatagtagcggaatacaaccttctagagcgggggcctcggggccggtgggatgcgaccggggagatggcggtcggcggcggcgtgaaaaaccaccctatggtcatggaccacgcctgaacgttgctgatgcataaactgagctcccgaatgagcgcagagtccatgtggctcgagagcgtcggcccagtggtctggcaattgaccaggcaataccggttgacgtgaatgtggtagttgtgcccgcgtatggtggcgaaacacctgtacctactgaaggtcagatgggagtgcgtccacgtcgtccggtataatcggctcgcgcaacagcggctggatcgggacgaagtcggctactccccgaagccccagtgtgcgtaccctccttctcccgcggtggatgccggtttgaggcggcggcggcgtcgctatctacgttctctacgtcctgttctccttcctcttcttcttcacggccatctttccgagtacgttctgatgatgtttctggacgcggctacagttttgcttcggaccccgtaccggctggcggacgcgtaagtcgtccggcctgggttcctgtaccacgaagac

SEQ ID NO: 21 - protein, 233 aa, Artificial Sequence
  Description of Artificial Sequence: Synthetic polypeptide
MEHFLPLRNIWNRVRDFPRASTTAAGITWMSRYIYGYHRLMLEDLAPGAPATLRWPLYRQPPPHFLVGYQYLVRTCNDYVFDSRAYSRLRYTELSQPGHQTVNWSVMANCTYTINTGAYHRFVDMDDFQSTLTQVQQAILAERVVADLALLQPMRGFGVTRMGGRGRHLRPNSAAAAAIDARDAGQEEGEEEVPVERLMQDYYKDLRRCQNEAWGMADRLRIQQAGPKDMVLL

SEQ ID NO: 22 - DNA, 473 bp, Artificial Sequence
  Description of Artificial Sequence: Synthetic polynucleotide
ccgagactgggggcgtacactggatggcctttgcctggaacccgcactcaaaaacatgctacctctttgagccctttggcttttctgaccagcgactcaagcaggtttaccagtttgagtacgagtcactcctgcgccgtagcgccattgcttcttcccccgaccgctgtataacgctggaaaagtccacccaaagcgtacaggggcccaactcggccgcctgtggactattctgctgcatgtttctccacgcctttgccaactggccccaaactcccatggatcacaaccccaccatgaaccttattaccggggtacccaactccatgctcaacagtccccaggtacagcccaccctgcgtcgcaaccaggaacagctctacagcttcctggagcgccactcgccctacttccgcagccacagtgcgcagattaggagcgccacttctttttgtcacttgaaaaacatgtaa

SEQ ID NO: 23 - protein, 204 aa, Artificial Sequence
  Description of Artificial Sequence: Synthetic polypeptide
MGSSEQELKAIVKDLGCGPYFLGTYDKRFPGFVSPHKLACAIVNTAGRETGGVHWMAFAWNPRSKTCYLFEPFGFSDQRLKQVYQFEYESLLRRSAIASSPDRCITLEKSTQSVQGPNSAACGLFCCMFLHAFANWPQTPMDHNPTMNLITGVPNSMLNSPQVQPTLRRNQEQLYSFLERHSPYFRSHSAQIRSATSFCHLKNM

SEQ ID NO: 24 - DNA, 1590 bp, Artificial Sequence
  Description of Artificial Sequence: Synthetic polynucleotide
taccggtcagcccttctcctcgtcgcgctttggtgggggctcgcgcctgcgccacgccgcgctgcagggggttggtacctcctgcacagcaggggcaggggcagcggcggcggaggggcccgcgggggttttttcgcctactccgccgcatagctcaggctcctgctccttctgagtagtgttctgcgcgaccacggcgcgtgtgggtcgggcgccggtagctggagccgccgcctaaaccggtaacgcgggttcttctttttcttcgcgggaagagggttcgggctcgcgggcggtagtggtctccattagcacctgtcgctccttctttctcttctacaccgcgatgtttaccacccaaagtcgttgggtggccacgattagttcgtaccgtttcctccattcgcgtgtcacgccgccgacttacttctgctgggtcaccgcgcaccatacgcctgcgttctccttctccttctcgggtcgcttcgcctttcactttaatgccactacttgggcgactcacacggctagcacagacgcaccctcttcccgtacctccgacgcgcgcgcgactacctgttcatggtgcacctattgctagatttccgcttgaagtttgatgacggactggttcaccttcgagaccgccggcatacgttctggaccgacttgctcctcgtggcgcccaacgtcgactggaagtggtcgttgttctggaaacactgctactaccccgctaaggacgtccgcatggacgtcagcaaacgtctccactggatgttcgtagtgctcgggtgcccgacgcgcaacaccgacgtggcgacgcgactctagcttccgctcgaattcacagatgtgccttcgtaatactatttattcctcgtgcactaactttacctacactgctcgcttttgcccgtcgcgcgcgacttcctcgtcagatcgttccggttctagcacttcttggccaccccggctttacaccacgtctagaggttgtggctgcgttccacgacgcacgtgctgcgccggacaggccggttagtcaaaaggccgttcagaacgccgtacaagaagagacttccgcgtttccgagtccaccgaaaattcgtctagttccgaaaatacgtccgcgacataggattgcgggtctggcccgtgccagtggaaaactacggtgatgccacgctcacgttgagtttcggacccgtgcgcgggaaaaacccttccgtcgatggtttcaactgaggcaagcgggactcgttgcgcctcctggacctgcgcctagactagaggctgttctcgcacgaccggtcgcacgtggtgggccgcgactatcacaaggtcacgacgttgggacacatagcgttgagcgcgcgcgtcccgcctccggggttgacgctgaagttctatagccgcgggctggacgatttgcgcaaccactaccacgcgtcggacacctcacttttgaagtggctcgacggcgcctaccaacacggactcaaattcacctcgtgatttgtggtcatagcgttgcacagggacggtcaccgcgtatcgctacgcgccgtcttggggaaactaaaaatt

SEQ ID NO: 25 - protein, 529 aa, Artificial Sequence
  Description of Artificial Sequence: Synthetic polypeptide
MASREEEQRETTPERGRGAARRPPTMEDVSSPSPSPPPPRAPPKKRMRRRIESEDEEDSSQDALVPRTPSPRPSTSAADLAIAPKKKKKRPSPKPERPPSPEVIVDSEEEREDVALQMVGFSNPPVLIKHGKGGKRTVRRLNEDDPVARGMRTQEEEEEPSEAESEITVMNPLSVPIVSAWEKGMEAARALMDKYHVDNDLKANFKLLPDQVEALAAVCKTWLNEEHRGLQLTFTSNKTFVTMMGRFLQAYLQSFAEVTYKHHEPTGCALWLHRCAEIEGELKCLHGSIMINKEHVIEMDVTSENGQRALKEQSSKAKIVKNRWGRNVVQISNTDARCCVHDAACPANQFSGKSCGMFFSEGAKAQVAFKQIKAFMQALYPNAQTGHGHLLMPLRCECNSKPGHAPFLGRQLPKLTPFALSNAEDLDADLISDKSVLASVHHPALIVFQCCNPVYRNSRAQGGGPNCDFKISAPDLLNALVMVRSLWSENFTELPRMVVPEFKWSTKHQYRNVSLPVAHSDARQNPFDF

SEQ ID NO: 26 - DNA, 278 bp, Artificial Sequence
  Description of Artificial Sequence: Synthetic polynucleotide
agctccactcggggtgcaagacgaagtgagaggggtagaggggggggaggggtgggggttaaaacataaataaataaaaaattaataaaacacgtcgctacccccgccccccccccccccccgcgcgcggtccgccccgccccgccccgctccccgccccgccccgctccgcctctccacgccgccgtcggttagtctcgccgcgcgaggctttcaaaggaaaataccgctccgccgccgccgccgccgggatatttttcgcttcgcgcgccgcccgc

SEQ ID NO: 27 - DNA, 35 bp, Artificial Sequence
  Description of Artificial Sequence: Synthetic oligonucleotide
tgccgcgtctgccgttcccacccccatttattagt

SEQ ID NO: 28 - DNA, 135 bp, Artificial Sequence
  Description of Artificial Sequence: Synthetic polynucleotide
gatccagacatgataagatacattgatgagtttggacaaaccacaactagaatgcagtgaaaaaaatgctttatttgtgaaatttgtgatgctattgctttatttgtaaccattataagctgcaataaacaagtt

SEQ ID NO: 29 - DNA, 3705 bp, Human alphaherpesvirus 1
atgttttccggtggcggcggcccgctgtcccccggaggaaagtcggcggccagggcggcgtccgggttttttgcgcccgccggccctcgcggagccagccggggacccccgccttgtttgaggcaaaacttttacaacccctacctcgccccagtcgggacgcaacagaagccgaccgggccaacccagcgccatacgtactatagcgaatgcgatgaatttcgattcatcgccccgcgggtgctggacgaggatgcccccccggagaagcgcgccggggtgcacgacggtcacctcaagcgcgcccccaaggtgtactgcgggggggacgagcgcgacgtcctccgcgtcgggtcgggcggcttctggccgcggcgctcgcgcctgtggggcggcgtggaccacgccccggcggggttcaaccccaccgtcaccgtctttcacgtgtacgacatcctggagaacgtggagcacgcgtacggcatgcgcgcggcccagttccacgcgcggtttatggacgccatcacaccgacggggaccgtcatcacgctcctgggcctgactccggaaggccaccgggtggccgttcacgtttacggcacgcggcagtacttttacatgaacaaggaggaggtcgacaggcacctacaatgccgcgccccacgagatctctgcgagcgcatggccgcggccctgcgcgagtccccgggcgcgtcgttccgcggcatctccgcggaccacttcgaggcggaggtggtggagcgcaccgacgtgtactactacgagacgcgccccgctctgttttaccgcgtctacgtccgaagcgggcgcgtgctgtcgtacctgtgcgacaacttctgcccggccatcaagaagtacgagggtggggtcgacgccaccacccggttcatcctggacaaccccgggttcgtcaccttcggctggtaccgtctcaaaccgggccggaacaacacgctagcccagccgcgggccccgatggccttcgggacatccagcgacgtcgagtttaactgtacggcggacaacctggccatcgaggggggcatgagcgacctaccggcatacaagctcatgtgcttcgatatcgaatgcaaggcggggggggaggacgagctggcctttccggtggccgggcacccggaggacctggtcatccagatatcctgtctgctctacgacctgtccaccaccgccctggagcacgtcctcctgttttcgctcggttcctgcgacctccccgaatcccacctgaacgagctggcggccaggggcctgcccacgcccgtggttctggaattcgacagcgaattcgagatgctgttggccttcatgacccttgtgaaacagtacggccccgagttcgtgaccgggtacaacatcatcaacttcgactggcccttcttgctggccaagctgacggacatttacaaggtccccctggacgggtacggccgcatgaacggccggggcgtgtttcgcgtgtgggacataggccagagccacttccagaagcgcagcaagataaaggtgaacggcatggtgaacatcgacatgtacgggattataaccgacaagatcaagctctcgagctacaagctcaacgccgtggccgaagccgtcctgaaggacaagaagaaggacctgagctatcgcgacatccccgcctactacgccgccgggcccgcgcaacgcggggtgatcggcgagtactgcatacaggattccctgctggtgggccagctgttttttaagtttttgccccatctggagctctcggccgtcgcgcgcttggcgggtattaacatcacccgcaccatctacgacggccagcagatccgcgtctttacgtgcctgctgcgcctggccgaccagaagggctttattctgccggacacccaggggcgatttaggggcgccgggggggaggcgcccaagcgtccggccgcagcccgggaggacgaggagcggccagaggaggagggggaggacgaggacgaacgcgaggagggcgggggcgagcgggagccggagggcgcgcgggagaccgccggcaggcacgtggggtaccagggggccagggtccttgaccccacttccgggtttcacgtgaaccccgtggtggtgttcgactttgccagcctgtaccccagcatcatccaggcccacaacctgtgcttcagcacgctctccctgagggccgacgcagtggcgcacctggaggcgggcaaggactacctggagatcgaggtgggggggcgacggctgttcttcgtcaaggctcacgtgcgagagagcctcctcagcatcctcctgcgggactggctcgccatgcgaaagcagatccgctcgcggattccccagagcagccccgaggaggccgtgctcctggacaagcagcaggccgccatcaaggtcgtgtgtaactcggtgtacgggttcacgggagtgcagcacggactcctgccgtgcctgcacgttgccgcgacggtgacgaccatcggccgcgagatgctgctcgcgacccgcgagtacgtccacgcgcgctgggcggccttcgaacagctcctggccgatttcccggaggcggccgacatgcgcgcccccgggccctattccatgcgcatcatctacggggacacggactccatctttgtgctgtgccgcggcctcacggccgccgggctgacggccgtgggcgacaagatggcgagccacatctcgcgcgcgctgtttctgccccccatcaaactcgagtgcgaaaagacgttcaccaagctgctgctgatcgccaagaaaaagtacatcggcgtcatctacgggggtaagatgctcatcaagggcgtggatctggtgcgcaaaaacaactgcgcgtttatcaaccgcacctccagggccctggtcgacctgctgttttacgacgataccgtctccggagccgccgcggcgttagccgagcgccccgcggaggagtggctggcgcgacccctgcccgagggactgcaggcgttcggggccgtcctcgtagacgcccatcggcgcatcaccgacccggagagggacatccaggactttgtcctcaccgccgaactgagcagacacccgcgcgcgtacaccaacaagcgcctggcccacctgacggtgtattacaagctcatggcccgccgcgcgcaggtcccgtccatcaaggaccggatcccgtacgtgatcgtggcccagacccgcgaggtagaggagacggtcgcgcggctggccgccctccgcgagctagacgccgccgccccaggggacgagcccgccccccccgcggccctgccctccccggccaagcgcccccgggagacgccgtcgcctgccgaccccccgggaggcgcgtccaagccccgcaagctgctggtgtccgagctggccgaggatcccgcatacgccattgcccacggcgtcgccctgaacacggactattacttctcccacctgttgggggcggcgtgcgtgacattcaaggccctgtttgggaataacgccaagatcaccgagagtctgttaaaaaggtttattcccgaagtgtggcaccccccggacgacgtggccgcgcggctccggaccgcagggttcggggcggtgggtgccggcgctacggcggaggaaactcgtcgaatgttgcatagagcctttgatactctagca

SEQ ID NO: 30 - protein, 1235 aa, Human alphaherpesvirus 1
MFSGGGGPLSPGGKSAARAASGFFAPAGPRGASRGPPPCLRQNFYNPYLAPVGTQQKPTGPTQRHTYYSECDEFRFIAPRVLDEDAPPEKRAGVHDGHLKRAPKVYCGGDERDVLRVGSGGFWPRRSRLWGGVDHAPAGFNPTVTVFHVYDILENVEHAYGMRAAQFHARFMDAITPTGTVITLLGLTPEGHRVAVHVYGTRQYFYMNKEEVDRHLQCRAPRDLCERMAAALRESPGASFRGISADHFEAEVVERTDVYYYETRPALFYRVYVRSGRVLSYLCDNFCPAIKKYEGGVDATTRFILDNPGFVTFGWYRLKPGRNNTLAQPRAPMAFGTSSDVEFNCTADNLAIEGGMSDLPAYKLMCFDIECKAGGEDELAFPVAGHPEDLVIQISCLLYDLSTTALEHVLLFSLGSCDLPESHLNELAARGLPTPVVLEFDSEFEMLLAFMTLVKQYGPEFVTGYNIINFDWPFLLAKLTDIYKVPLDGYGRMNGRGVFRVWDIGQSHFQKRSKIKVNGMVNIDMYGIITDKIKLSSYKLNAVAEAVLKDKKKDLSYRDIPAYYAAGPAQRGVIGEYCIQDSLLVGQLFFKFLPHLELSAVARLAGINITRTIYDGQQIRVFTCLLRLADQKGFILPDTQGRFRGAGGEAPKRPAAAREDEERPEEEGEDEDEREEGGGEREPEGARETAGRHVGYQGARVLDPTSGFHVNPVVVFDFASLYPSIIQAHNLCFSTLSLRADAVAHLEAGKDYLEIEVGGRRLFFVKAHVRESLLSILLRDWLAMRKQIRSRIPQSSPEEAVLLDKQQAAIKVVCNSVYGFTGVQHGLLPCLHVAATVTTIGREMLLATREYVHARWAAFEQLLADFPEAADMRAPGPYSMRIIYGDTDSIFVLCRGLTAAGLTAVGDKMASHISRALFLPPIKLECEKTFTKLLLIAKKKYIGVIYGGKMLIKGVDLVRKNNCAFINRTSRALVDLLFYDDTVSGAAAALAERPAEEWLARPLPEGLQAFGAVLVDAHRRITDPERDIQDFVLTAELSRHPRAYTNKRLAHLTVYYKLMARRAQVPSIKDRIPYVIVAQTREVEETVARLAALRELDAAAPGDEPAPPAALPSPAKRPRETPSPADPPGGASKPRKLLVSELAEDPAYAIAHGVALNTDYYFSHLLGAACVTFKALFGNNAKITESLLKRFIPEVWHPPDDVAARLRTAGFGAVGAGATAEETRRMLHRAFDTLA

SEQ ID NO: 31 - DNA, 1461 bp, Human alphaherpesvirus 1
acggattcccctggcggtgtggcccccgcctcccccgtggaggacgcgtcggacgcgtccctcgggcagccggaggagggggcgccctgccaggtggtcctgcagggcgccgaacttaatggaatcctacaggcgtttgccccgctgcgcacgagccttctggactcgcttctggttatgggcgaccggggcatccttatccataacacgatctttggggagcaggtgttcctgcccctggaacactcgcaattcagtcggtatcgctggcgcggacccacggcggcgttcctgtctctcgtggaccagaagcgctccctcctgagcgtgtttcgcgccaaccagtacccggacctacgtcgggtggagttggcgatcacgggccaggccccgtttcgcacgctggttcagcgcatatggacgacgacgtccgacggcgaggccgttgagctagccagcgagacgctgatgaagcgcgaactgacgagctttgtggtgctggttccccagggaacccccgacgttcagttgcgcctgacgaggccgcagctcaccaaggtccttaacgcgaccggggccgatagtgccacgcccaccacgttcgagctcggggttaacggcaaattttccgtgttcaccacgagtacctgcgtcacctttgctgcccgcgaggagggcgtgtcgtccagcaccagcacccaggtccagatcctgtccaacgcgctcaccaaggcgggccaggccgccgcgaacgccaagacggtgtacggggaaaatacccatcgcaccttctctgtggtcgtcgacgattgcagcatgcgggcggtgctccggcgactgcaggtcggcgggggcaccctcaagttcttcctcacgacccccgtccccagtctgtgcgtcaccgccaccggtcccaacgcggtatcggcggtatttctcctgaaaccccagaagatttgcctggactggctgggtcatagccaggggtctccttcagccgggagctcggcctcccgggcctctgggagcgagccaacagacagccaggactccgcgtcggacgcggtcagccacggcgatccggaagacctcgatggcgctgcccgggcgggagaggcgggggccttgcatgcctgtccgatgccgtcgtcgaccacgcgggtcactcccacgaccaagcgggggcgctcggggggcgaggatgcgcgcgcggacacggccctaaagaaacctaagacggggtcgcccaccgcacccccgcccgcagatccagtccccctggacacggaggacgactccgatgcggcggacgggacggcggcccgtcccgccgctccagacgcccggagcggaagccgttacgcgtgttactttcgcgacctcccgaccggagaagcaagccccggcgccttctccgccttccgggggggcccccaaaccccgtatggttttggattcccc

SEQ ID NO: 32 - protein, 487 aa, Human alphaherpesvirus 1
TDSPGGVAPASPVEDASDASLGQPEEGAPCQVVLQGAELNGILQAFAPLRTSLLDSLLVMGDRGILIHNTIFGEQVFLPLEHSQFSRYRWRGPTAAFLSLVDQKRSLLSVFRANQYPDLRRVELAITGQAPFRTLVQRIWTTTSDGEAVELASETLMKRELTSFVVLVPQGTPDVQLRLTRPQLTKVLNATGADSATPTTFELGVNGKFSVFTTSTCVTFAAREEGVSSSTSTQVQILSNALTKAGQAAANAKTVYGENTHRTFSVVVDDCSMRAVLRRLQVGGGTLKFFLTTPVPSLCVTATGPNAVSAVFLLKPQKICLDWLGHSQGSPSAGSSASRASGSEPTDSQDSASDAVSHGDPEDLDGAARAGEAGALHACPMPSSTTRVTPTTKRGRSGGEDARADTALKKPKTGSPTAPPPADPVPLDTEDDSDAADGTAARPAAPDARSGSRYACYFRDLPTGEASPGAFSAFRGGPQTPYGFGFP

SEQ ID NO: 33 - DNA, 57 bp, Artificial Sequence
  Description of Artificial Sequence: Synthetic oligonucleotide
gcaacaaacttctctctgctgaaacaagccggagatgtcgaagagaatcctggaccg

SEQ ID NO: 34 - protein, 19 aa, Artificial Sequence
  Description of Artificial Sequence: Synthetic peptide
ATNFSLLKQAGDVEENPGP

SEQ ID NO: 35 - DNA, 212 bp, Artificial Sequence
  Description of Artificial Sequence: Synthetic polynucleotide
gggcagagcgcacatcgcccacagtccccgagaagttggggggaggggtcggcaattgaaccggtgcctagagaaggtggcgcggggtaaactgggaaagtgatgtcgtgtactggctccgcctttttcccgagggtgggggagaaccgtatataagtgcagtagtcgccgtgaacgttctttttcgcaacgggtttgccgccagaacacag

SEQ ID NO: 36 - DNA, 56 bp, Artificial Sequence
  Description of Artificial Sequence: Synthetic oligonucleotide
aataaaggaaatttattttcattgcaatagtgtgttggaattttttgtgtctctca

SEQ ID NO: 37 - DNA, 3588 bp, Human alphaherpesvirus 1
atggagacaaagcccaagacggcaaccaccatcaaggtcccccccgggcccctgggatacgtgtacgctcgcgcgtgtccgtccgaaggcatcgagcttctggcgttactgtcggcacgcagcggcgattccgacgtcgccgtggcgcccctggtcgtgggcctgaccgtggagagcggctttgaggccaacgtggccgtggtcgtgggttctcgcacgacggggctcgggggtaccgcggtgtccctgaaactgacgccctcgcactacagctcgtccgtgtacgtctttcacggcggccggcacctggaccccagcacccaggccccgaacctgacgcgactttgcgagcgggcacgccgccattttggcttttcggactacaccccccggcccggcgacctcaaacacgagacgacgggggaggcgctgtgtgagcgcctcggcctggacccggaccgcgccctcctgtatctggtcgttaccgagggcttcaaggaggccgtgtgcatcaacaacacctttctgcacctgggaggctcggacaaggtaaccataggcggggcggaggtgcaccgcatacccgtgtacccgttgcagctgttcatgccggattttagccgtgtcatcgcagagccgttcaacgccaaccaccgatcgatcggggagaattttacctacccgcttccgttttttaaccgccccctcaaccgcctcctgttcgaggcggtcgtgggacccgccgccgtggcactgcgatgccgaaacgtggacgccgtggcccgcgccgccgcccacctggcgtttgacgaaaaccacgagggcgccgccctccccgccgacattacgttcacggccttcgaagccagccagggtaagaccccgcggggcgggcgcgacggcggcggcaagggcccggcgggcgggttcgaacagcgcctggcctccgtcatggccggagacgccgccctggccctcgagtctatcgtgtcgatggccgtctttgacgagccgcccaccgacatctccgcgtggccgctgttcgagggccaggacacggccgcggcccgcgccaacgccgtcggggcgtacctggcgcgcgccgcgggactcgtgggggccatggtatttagcaccaactcggccctccatctcaccgaggtggacgacgccggcccggcggacccaaaggaccacagcaaaccctccttttaccgcttcttcctcgtgcccgggacccacgtggcggccaacccacaggtggaccgcgagggacacgtggtgcccgggttcgagggtcggcccaccgcgcccctcgtcggcggaacccaggaatttgccggcgagcacctggccatgctgtgtgggttttccccggcgctgctggccaagatgctgttttacctggagcgctgcgacggcggcgtgatcgtcgggcgccaggagatggacgtgtttcgatacgtcgcggactccaaccagaccgacgtgccctgtaacctatgcaccttcgacacgcgccacgcctgcgtacacacgacgctcatgcgcctccgggcgcgccatccaaagttcgccagcgccgcccgcggagccatcggcgtcttcgggaccatgaacagcatgtatagcgactgcgacgtgctgggaaactacgccgccttctcggccctgaagcgcgcggacggatccgagaccgcccggaccatcatgcaggagacgtaccgcgcggcgaccgagcgcgtcatggccgaactcgagaccctgcagtacgtggaccaggcggtccccacggccatggggcggctggagaccatcatcaccaaccgcgaggccctgcatacggtggtgaacaacgtcaggcaggtcgtggaccgcgaggtggagcagctgatgcgcaacctggtggaggggaggaacttcaagtttcgcgacggtctgggcgaggccaaccacgccatgtccctgacgctggacccgtacgcgtgcgggccgtgccccctgcttcagcttctcgggcggcgatccaacctcgccgtgtaccaggacctggccctgagtcagtgccacggggtgttcgccgggcagtcggtcgaggggcgcaactttcgcaatcaattccaaccggtgctgcggcggcgcgtgatggacatgtttaacaacgggtttctgtcggccaaaacgctgacggtcgcgctctcggagggggcggctatctgcgcccccagcctaacggcgggccagacggcccccgccgagagcagcttcgagggcgacgttgcccgcgtgaccctggggtttcccaaggagctgcgcgtcaagagccgcgtgttgttcgcgggcgcgagcgccaacgcgtccgaggccgccaaggcgcgggtcgccagcctccagagcgcctaccagaagcccgacaagcgcgtggacatcctcctcggaccgctgggctttctgctcaagcagttccacgcggccatcttccccaacggcaagcccccggggtccaaccagccgaacccgcagtggttctggacggccctccaacgcaaccagcttcccgcccggctcctgtcgcgcgaggacatcgagaccatcgcgttcattaaaaagttttccctggactacggcgcgataaactttattaacctggcccccaacaacgtgagcgagctggcgatgtactacatggcaaaccagattctgcggtactgcgatcactcgacatacttcatcaacacccttacggccatcatcgcggggtcccgccgtccccccagcgtgcaggctgccgccgcgtggtccgcgcagggcggggcgggcctggaggccggggcccgcgcgctgatggacgccgtggacgcgcatccgggcgcgtggacgtccatgttcgccagctgcaacctgctgcggcccgtcatggcggcgcgccccatggtcgtgttggggttgagcatcagcaagtactacggcatggccggcaacgaccgtgtgtttcaggccgggaactgggccagcctgatgggcggcaaaaacgcgtgcccgctccttatttttgaccgcacccgcaagttcgtcctggcctgtccccgggccgggtttgtgtgcgcggcctcaagcctcggcggcggagcgcacgaaagctcgctgtgcgagcagctccggggcattatctccgagggcggggcggccgtcgccagtagcgtgttcgtggcgaccgtgaaaagcctggggccccgcacccagcagctgcagatcgaggactggctggcgctcctggaggacgagtacctaagcgaggagatgatggagctgaccgcgcgtgccctggagcgcggcaacggcgagtggtcgacggacgcggccctggaggtggcgcacgaggccgaggccctagtcagccaactcggcaacgccggggaggtgtttaactttggggattttggctgcgaggacgacaacgcgacgccgttcggcggcccgggggccccgggaccggcatttgccggccgcaaacgggcgttccacggggatgacccgtttggggaggggccccccgacaaaaagggagacctgacgttggatatgctg

SEQ ID NO: 38 - protein, 1196 aa, Human alphaherpesvirus 1
METKPKTATTIKVPPGPLGYVYARACPSEGIELLALLSARSGDSDVAVAPLVVGLTVESGFEANVAVVVGSRTTGLGGTAVSLKLTPSHYSSSVYVFHGGRHLDPSTQAPNLTRLCERARRHFGFSDYTPRPGDLKHETTGEALCERLGLDPDRALLYLVVTEGFKEAVCINNTFLHLGGSDKVTIGGAEVHRIPVYPLQLFMPDFSRVIAEPFNANHRSIGENFTYPLPFFNRPLNRLLFEAVVGPAAVALRCRNVDAVARAAAHLAFDENHEGAALPADITFTAFEASQGKTPRGGRDGGGKGPAGGFEQRLASVMAGDAALALESIVSMAVFDEPPTDISAWPLFEGQDTAAARANAVGAYLARAAGLVGAMVFSTNSALHLTEVDDAGPADPKDHSKPSFYRFFLVPGTHVAANPQVDREGHVVPGFEGRPTAPLVGGTQEFAGEHLAMLCGFSPALLAKMLFYLERCDGGVIVGRQEMDVFRYVADSNQTDVPCNLCTFDTRHACVHTTLMRLRARHPKFASAARGAIGVFGTMNSMYSDCDVLGNYAAFSALKRADGSETARTIMQETYRAATERVMAELETLQYVDQAVPTAMGRLETIITNREALHTVVNNVRQVVDREVEQLMRNLVEGRNFKFRDGLGEANHAMSLTLDPYACGPCPLLQLLGRRSNLAVYQDLALSQCHGVFAGQSVEGRNFRNQFQPVLRRRVMDMFNNGFLSAKTLTVALSEGAAICAPSLTAGQTAPAESSFEGDVARVTLGFPKELRVKSRVLFAGASANASEAAKARVASLQSAYQKPDKRVDILLGPLGFLLKQFHAAIFPNGKPPGSNQPNPQWFWTALQRNQLPARLLSREDIETIAFIKKFSLDYGAINFINLAPNNVSELAMYYMANQILRYCDHSTYFINTLTAIIAGSRRPPSVQAAAAWSAQGGAGLEAGARALMDAVDAHPGAWTSMFASCNLLRPVMAARPMVVLGLSISKYYGMAGNDRVFQAGNWASLMGGKNACPLLIFDRTRKFVLACPRAGFVCAASSLGGGAHESSLCEQLRGIISEGGAAVASSVFVATVKSLGPRTQQLQIEDWLALLEDEYLSEEMMELTARALERGNGEWSTDAALEVAHEAEALVSQLGNAGEVFNFGDFGCEDDNATPFGGPGAPGPAFAGRKRAFHGDDPFGEGPPDKKGDLTLDML

SEQ ID NO: 39 - DNA, 753 bp, Human alphaherpesvirus 1
aaatgagtcttcggacctcgcgggggccgcttaagcggtggttagggtttgtctgacgcggggggagggggaaggaacgaaacactctcattcggaggcggctcggggtttggtcttggtggccacgggcacgcagaagagcgccgcgatcctcttaagcacccccccgccctccgtggaggcgggggtttggtcggcgggtggtaactggcgggccgctgactcgggcgggtcgcgcgccccagagtgtgaccttttcggtctgctcgcagacccccgggcggcgccgccgcggcggcgacgggctcgctgggtcctaggctccatggggaccgtatacgtggacaggctctggagcatccgcacgactgcggtgatattaccggagaccttctgcgggacgagccgggtcacgcggctgacgcggagcgtccgttgggcgacaaacaccaggacggggcacaggtacactatcttgtcacccggaggcgcgagggactgcaggagcttcagggagtggcgcagctgcttcatccccgtggcccgttgctcgcgtttgctggcggtgtccccggaagaaatatatttgcatgtctttagttctatgatgacacaaaccccgcccagcgtcttgtcattggcgaattcgaacacgcagatgcagtcggggcggcgcggtcccaggtccacttcgcatattaaggtgacgcgtgtggcctcgaacaccgagcgaccctgcagcgacccgcttaa

SEQ ID NO: 40 - DNA, 48 bp, Human alphaherpesvirus 1
cggcaataaaaagacagaataaaacgcacggtgttgggtcgtttgttc

SEQ ID NO: 41 - DNA, 12130 bp, Artificial Sequence
  Description of Artificial Sequence: Synthetic polynucleotide
tgcagctctggcccgtgtctcaaaatctctgatgttacattgcacaagataaaaatatatcatcatgaacaataaaactgtctgcttacataaacagtaatacaaggggtgttatgagccatattcaacgggaaacgtcgaggccgcgattaaattccaacatggatgctgatttatatgggtataaatgggctcgcgataatgtcgggcaatcaggtgcgacaatctatcgcttgtatgggaagcccgatgcgccagagttgtttctgaaacatggcaaaggtagcgttgccaatgatgttacagatgagatggtcagactaaactggctgacggaatttatgcctcttccgaccatcaagcattttatccgtactcctgatgatgcatggttactcaccactgcgatccccggaaaaacagcattccaggtattagaagaatatcctgattcaggtgaaaatattgttgatgcgctggcagtgttcctgcgccggttgcattcgattcctgtttgtaattgtccttttaacagcgatcgcgtatttcgtctcgctcaggcgcaatcacgaatgaataacggtttggttgatgcgagtgattttgatgacgagcgtaatggctggcctgttgaacaagtctggaaagaaatgcataaacttttgccattctcaccggattcagtcgtcactcatggtgatttctcacttgataaccttatttttgacgaggggaaattaataggttgtattgatgttggacgagtcggaatcgcagaccgataccaggatcttgccatcctatggaactgcctcggtgagttttctccttcattacagaaacggctttttcaaaaatatggtattgataatcctgatatgaataaattgcagtttcatttgatgctcgatgagtttttctaatcagaattggttaattggttgtaacattattcagattgggcttgatttaaaacttcatttttaatttaaaaggatctaggtgaagatcctttttgataatctcatgaccaaaatcccttaacgtgagttttcgttccactgagcgtcagaccccgtagaaaagatcaaaggatcttcttgagatcctttttttctgcgcgtaatctgctgcttgcaaacaaaaaaaccaccgctaccagcggtggtttgtttgccggatcaagagctaccaactctttttccgaaggtaactggcttcagcagagcgcagataccaaatactgttcttctagtgtagccgtagttaggccaccacttcaagaactctgtagcaccgcctacatacctcgctctgctaatcctgttaccagtggctgctgccagtggcgataagtcgtgtcttaccgggttggactcaagacgatagttaccggataaggcgcagcggtcgggctgaacggggggttcgtgcacacagcccagcttggagcgaacgacctacaccgaactgagatacctacagcgtgagctatgagaaagcgccacgcttcccgaagggagaaaggcggacaggtatccggtaagcggcagggtcggaacaggagagcgcacgagggagcttccagggggaaacgcctggtatctttatagtcctgtcgggtttcgccacctctgacttgagcgtcgatttttgtgatgctcgtcaggggggcggagcctatggaaaaacgccagcaacgcggcctttttacggttcctggccttttgctggccttttgctcacatgttctttcctgcgttatcccctgattctgtggataaccgtattaccgcctttgagtgagctgataccgctcgccgcagccgaacgaccgagcgcagcgagtcagtgagcgaggaagcggaagagcgcccaatacgcaaaccgcctctccccgcgcgttggccgattcattaatgcagctggcacgacaggtttcccgactggaaagcgggcagtgagcgcaacgcaattaatgtgagttagctcactcattaggcaccccaggctttacactttatgcttccggctcgtatgttgtgtggaattgtgagcggataacaatttcacacaggaaacagctatgaccatgattacaccaagcttgcatgcaggcctctgcagtcgaccagaagcaccatgtccttgggtccggcctgctgaatgcgcaggcggtcggccatgccccaggcttcgttttgacatcggcgcaggtctttgtagtagtcttgcatgagcctttctaccggcacttcttcttctccttcctcttgtcctgcatctcttgcatctatcgctgcggcggcggcggagtttggccgtaggtggcgccctcttcctcccatgcgtgtgaccccgaagcccctcatcggctgaagcagggctaggtcggcgacaacgcgctcggctaatatggcctgctgcacctgcgtgagggtagactggaagtcatccatgtccacaaagcggtggtatgcgcccgtgttgatggtgtaagtgcagttggccataacggaccagttaacggtctggtgacccggctgcgagagctcggtgtacctgagacgcgagtaagccctcgagtcaaatacgtagtcgttgcaagtccgcaccaggtactggtatcccaccaaaaagtgcggcggcggctggcggtagaggggccagcgtagggtggccggggctccgggggcgagatcttccaacataaggcgatgatatccgtagatgtacctggacatccaggtgatgccggcggcggtggtggaggcgcgcggaaagtcgcggacgcggttccagatgttgcgcagcggcaaaaagtgctccatggtcgggacgctctggccggtcaggcgcgcgcaatcgttgacgctctagcgtgcaaaaggagagcctgtaagcgggcactcttccgtggtctggtggataaattcgcaagggtatcatggcggacgaccggggttcgagccccgtatccggccgtccgccgtgatccatgcggttaccgcccgcgtgtcgaacccaggtgtgcgacgtcagacaacgggggagtgctccttttggcttccttccaggcgcggcggctgctgcgctagcttttttggccactggccgcgcgcagcgtaagcggttaggctggaaagcgaaagcattaagtggctcgctccctgtagccggagggttattttccaagggttgagtcgcgggacccccggttcgagtctcggaccgagactgggggcgtacactggatggcctttgcctggaacccgcactcaaaaacatgctacctctttgagccctttggcttttctgaccagcgactcaagcaggtttaccagtttgagtacgagtcactcctgcgccgtagcgccattgcttcttcccccgaccgctgtataacgctggaaaagtccacccaaagcgtacaggggcccaactcggccgcctgtggactattctgctgcatgtttctccacgcctttgccaactggccccaaactcccatggatcacaaccccaccatgaaccttattaccggggtacccaactccatgctcaacagtccccaggtacagcccaccctgcgtcgcaaccaggaacagctctacagcttcctggagcgccactcgccctacttccgcagccacagtgcgcagattaggagcgccacttctttttgtcacttgaaaaacatgtaaaaataatgtactagagacactttcaataaaggcaaatgcttttatttgtacactctcgggtgattatttacccccacccttgccgtctgcgccgtttaaaaatcaaaggggttctgccgcgcatcgctatgcgccactggcagggacacgttgcgatactggtgtttagtgctccacttaaactcaggcacaaccatccgcggcagctcggtgaagttttcactccacaggctgcgcaccatcaccaacgcgtttagcaggtcgggcgccgatatcttgaagtcgcagttggggcctccgccctgcgcgcgcgagttgcgatacacagggttgcagcactggaacactatcagcgccgggtggtgcacgctggccagcacgctcttgtcggagatcagatccgcgtccaggtcctccgcgttgctcagggcgaacggagtcaactttggtagctgccttcccaaaaagggcgcgtgcccaggctttgagttgcactcgcaccgtagtggcatcaaaaggtgaccgtgcccggtctgggcgttaggatacagcgcctgcataaaagccttgatctgcttaaaagccacctgagcctttgcgccttcagagaagaacatgccgcaagacttgccggaaaactgattggccggacaggccgcgtcgtgcacgcagcaccttgcgtcggtgttggagatctgcaccacatttcggccccaccggttcttcacgatcttggccttgctagactgctccttcagcgcgcgctgcccgttttcgctcgtcacatccatttcaatcacgtgctccttatttatcataatgcttccgtgtagacacttaagctcgccttcgatctcagcgcagcggtgcagccacaacgcgcagcccgtgggctcgtgatgcttgtaggtcacctctgcaaacgactgcaggtacgcctgcaggaatcgccccatcatcgtcacaaaggtcttgttgctggtgaaggtcagctgcaacccgcggtgctcctcgttcagccaggtcttgcatacggccgccagagcttccacttggtcaggcagtagtttgaagttcgcctttagatcgttatccacgtggtacttgtccatcagcgcgcgcgcagcctccatgcccttctcccacgcagacacgatcggcacactcagcgggttcatcaccgtaatttcactttccgcttcgctgggctcttcctcttcctcttgcgtccgcataccacgcgccactgggtcgtcttcattcagccgccgcactgtgcgcttacctcctttgccatgcttgattagcaccggtgggttgctgaaacccaccatttgtagcgccacatcttctctttcttcctcgctgtccacgattacctctggtgatggcgggcgctcgggcttgggagaagggcgcttctttttcttcttgggcgcaatggccaaatccgccgccgaggtcgatggccgcgggctgggtgtgcgcggcaccagcgcgtcttgtgatgagtcttcctcgtcctcggactcgatacgccgcctcatccgcttttttgggggcgcccggggaggcggcggcgacggggacggggacgacacgtcctccatggttgggggacgtcgcgccgcaccgcgtccgcgctcgggggtggtttcgcgctgctcctcttcccgactggccatttccttctcctataggcagaaaaagatcatggagtcagtcgagaagaaggacagcctaaccgccccctctgagttcgccaccaccgcctccaccgatgccgccaacgcgcctaccaccttccccgtcgaggcacccccgcttgaggaggaggaagtgattatcgagcaggacccaggttttgtaagcgaagacgacgaggaccgctcagtaccaacagaggataaaaagcaagaccaggacaacgcagaggcaaacgaggaacaagtcgggcggggggacgaaaggcatggcgactacctagatgtgggagacgacgtgctgttgaagcatctgcagcgccagtgcgccattatctgcgacgcgttgcaagagcgcagcgatgtgcccctcgccatagcggatgtcagccttgcctacgaacgccacctattctcaccgcgcgtaccccccaaacgccaagaaaacggcacatgcgagcccaacccgcgcctcaacttctaccccgtatttgccgtgccagaggtgcttgccacctatcacatctttttccaaaactgcaagatacccctatcctgccgtgccaaccgcagccgagcggacaagcagctggccttgcggcagggcgctgtcatacctgatatcgcctcgctcaacgaagtgccaaaaatctttgagggtcttggacgcgacgagaagcgcgcggcaaacgctctgcaacaggaaaacagcgaaaatgaaagtcactctggagtgttggtggaactcgagggtgacaacgcgcgcctagccgtactaaaacgcagcatcgaggtcacccactttgcctacccggcacttaacctaccccccaaggtcatgagcacagtcatgagtgagctgatcgtgcgccgtgcgcagcccctggagagggatgcaaatttgcaagaacaaacagaggagggcctacccgcagttggcgacgagcagctagcgcgctggcttcaaacgcgcgagcctgccgacttggaggagcgacgcaaactaatgatggccgcagtgctcgttaccgtggagcttgagtgcatgcagcggttctttgctgacccggagatgcagcgcaagctagaggaaacattgcactacacctttcgacagggctacgtacgccaggcctgcaagatctccaacgtggagctctgcaacctggtctcctaccttggaattttgcacgaaaaccgccttgggcaaaacgtgcttcattccacgctcaagggcgaggcgcgccgcgactacgtccgcgactgcgtttacttatttctatgctacacctggcagacggccatgggcgtttggcagcagtgcttggaggagtgcaacctcaaggagctgcagaaactgctaaagcaaaacttgaaggacctatggacggccttcaacgagcgctccgtggccgcgcacctggcggacatcattttccccgaacgcctgcttaaaaccctgcaacagggtctgccagacttcaccagtcaaagcatgttgcagaactttaggaactttatcctagagcgctcaggaatcttgcccgccacctgctgtgcacttcctagcgactttgtgcccattaagtaccgcgaatgccctccgccgctttggggccactgctaccttctgcagctagccaactaccttgcctaccactctgacataatggaagacgtgagcggtgacggtctactggagtgtcactgtcgctgcaacctatgcaccccgcaccgctccctggtttgcaattcgcagctgcttaacgaaagtcaaattatcggtacctttgagctgcagggtccctcgcctgacgaaaagtccgcggctccggggttgaaactcactccggggctgtggacgtcggcttaccttcgcaaatttgtacctgaggactaccacgcccacgagattaggttctacgaagaccaatcccgcccgcctaatgcggagcttaccgcctgcgtcattacccagggccacattcttggccaattgcaagccatcaacaaagcccgccaagagtttctgctacgaaagggacggggggtttacttggacccccagtccggcgaggagctcaacccaatccccccgccgccgcagccctatcagcagcagccgcgggcccttgcttcccaggatggcacccaaaaagaagctgcagctgccgccgccacccacggacgaggaggaatactgggacagtcaggcagaggaggttttggacgaggaggaggaggacatgatggaagactgggagagcctagacgaggaagcttccgaggtcgaagaggtgtcagacgaaacaccgtcaccctcggtcgcattcccctcgccggcgccccagaaatcggcaaccggttccagcatggctacaacctccgctcctcaggcgccgccggcactgcccgttcgccgacccaaccgtagatgggacaccactggaaccagggccggtaagtccaagcagccgccgccgttagcccaagagcaacaacagcgccaaggctaccgctcatggcgcgggcacaagaacgccatagttgcttgcttgcaagactgtgggggcaacatctccttcgcccgccgctttcttctctaccatcacggcgtggccttcccccgtaacatcctgcattactaccgtcatctctacagcccatactgcaccggcggcagcggcagcaacagcagcggccacacagaagcaaaggcgaccggatagcaagactctgacaaagcccaagaaatccacagcggcggcagcagcaggaggaggagcgctgcgtctggcgcccaacgaacccgtatcgacccgcgagcttagaaacaggatttttcccactctgtatgctatatttcaacagagcaggggccaagaacaagagctgaaaataaaaaacaggtctctgcgatccctcacccgcagctgcctgtatcacaaaagcgaagatcagcttcggcgcacgctggaagacgcggaggctctcttcagtaaatactgcgcgctgactcttaaggactagtttcgcgccctttctcaaatttaagcgcgaaaactacgtcatctccagcggccacacccggcgccagcacctgttgtcagcgccattatgagcaaggaaattcccacgccctacatgtggagttaccagccacaaatgggacttgcggctggagctgcccaagactactcaacccgaataaactacatgagcgcggggcggccgccgtttgtgttatgtttcaacgtgtttatttttcaattgcagaaaatttcaagtcatttttcattcagtagtatagccccaccaccacatagcttatacagatcaccgtaccttaatcaaactcacagaaccctagtattcaacctgccacctccctcccaacacacagagtacacagtcctttctccccggctggccttaaaaagcatcatatcatgggtaacagacatattcttaggtgttatattccacacggtttcctgtcgagccaaacgctcatcagtgatattaataaactccccgggcagctcacttaagttcatgtcgctgtccagctgctgagccacaggctgctgtccaacttgcggttgcttaacgggcggcgaaggagaagtccacgcctacatgggggtagagtcataatcgtgcatcaggatagggcggtggtgctgcagcagcgcgcgaataaactgctgccgccgccgctccgtcctgcaggaatacaacatggcagtggtctcctcagcgatgattcgcaccgcccgcagcataaggcgccttgtcctccgggcacagcagcgcaccctgatctcacttaaatcagcacagtaactgcagcacagcaccacaatattgttcaaaatcccacagtgcaaggcgctgtatccaaagctcatggcggggaccacagaacccacgtggccatcataccacaagcgcaggtagattaagtggcgacccctcataaacacgctggacataaacattacctcttttggcatgttgtaattcaccacctcccggtaccatataaacctctgattaaacatggcgccatccaccaccatcctaaaccagctggccaaaacctgcccgccggctatacactgcagggaaccgggactggaacaatgacagtggagagcccaggactcgtaaccatggatcatcatgctcgtcatgatatcaatgttggcacaacacaggcacacgtgcatacacttcctcaggattacaagctcctcccgcgttagaaccatatcccagggaacaacccattcctgaatcagcgtaaatcccacactgcagggaagacctcgcacgtaactcacgttgtgcattgtcaaagtgttacattcgggcagcagcggatgatcctccagtatggtagcgcgggtttctgtctcaaaaggaggtagacgatccctactgtacggagtgcgccgagacaaccgagatcgtgttggtcgtagtgtcatgccaaatggaacgccggacgtagtcatatttcctgaagcaaaaccaggtgcgggcgtgacaaacagatctgcgtctccggtctcgccgcttagatcgctctgtgtagtagttgtagtatatccactctctcaaagcatccaggcgccccctggcttcgggttctatgtaaactccttcatgcgccgctgccctgataacatccaccaccgcagaataagccacacccagccaacctacacattcgttctgcgagtcacacacgggaggagcgggaagagctggaagaaccatgtttttttttttattccaaaagattatccaaaacctcaaaatgaagatctattaagtgaacgcgctcccctccggtggcgtggtcaaactctacagccaaagaacagataatggcatttgtaagatgttgcacaatggcttccaaaaggcaaacggccctcacgtccaagtggacgtaaaggctaaacccttcagggtgaatctcctctataaacattccagcaccttcaaccatgcccaaataattctcatctcgccaccttctcaatatatctctaagcaaatcccgaatattaagtccggccattgtaaaaatctgctccagagcgccctccaccttcagcctcaagcagcgaatcatgattgcaaaaattcaggttcctcacagacctgtataagattcaaaagcggaacattaacaaaaataccgcgatcccgtaggtcccttcgcagggccagctgaacataatcgtgcaggtctgcacggaccagcgcggccacttccccgccaggaaccatgacaaaagaacccacactgattatgacacgcatactcggagctatgctaaccagcgtagccccgatgtaagcttgttgcatgggcggcgatataaaatgcaaggtgctgctcaaaaaatcaggcaaagcctcgcgcaaaaaagaaagcacatcgtagtcatgctcatgcagataaaggcaggtaagctccggaaccaccacagaaaaagacaccatttttctctcaaacatgtctgcgggtttctgcataaacacaaaataaaataacaaaaaaacatttaaacattagaagcctgtcttacaacaggaaaaacaacccttataagcataagacggactacggccatgccggcgtgaccgtaaaaaaactggtcaccgtgattaaaaagcaccaccgacagctcctcggtcatgtccggagtcataatgtaagactcggtaaacacatcaggttgattcacatcggtcagtgctaaaaagcgaccgaaatagcccgggggaatacatacccgcaggcgtagagacaacattacagcccccataggaggtataacaaaattaataggagagaaaaacacataaacacctgaaaaaccctcctgcctaggcaaaatagcaccctcccgctccagaacaacatacagcgcttccacagcggcagccataacagtcagccttaccagtaaaaaagaaaacctattaaaaaaacaccactcgacacggcaccagctcaatcagtcacagtgtaaaaaagggccaagtgcagagcgagtatatataggactaaaaaatgacgtaacggttaaagtccacaaaaaacacccagaaaaccgcacgcgaacctacgcccagaaacgaaagccaaaaaacccacaacttcctcaaatcgtcacttccgttttcccacgttacgtcacttcccattttaagaaaactacaattcccaacacatacaagttactccgcccttaattaaatcggatccgatatctagatgtattcgcgaggtaccgagctcgaattctctggccgtcgttttacaacgtcgtgactgggaaaaccctggcgttacccaacttaatcgccttgcagcacatccccctttcgccagctggcgtaatagcgaagaggcccgcaccgatcgcccttcccaacagttgcgcagcctgaatggcgaatggcgcctgatgcggtattttctccttacgcatctgtgcggtatttcacaccgcatatggtgcactctcagtacaatctgctctgatgccgcatagttaagccagccccgacacccgccaacacccgctgacgcgccctgacgggcttgtctgctcccggcatccgcttacagacaagctgtgaccgtctccgggagctgcatgtgtcagaggttttcaccgtcatcaccgaaacgcgcga

SEQ ID NO: 42 - DNA, 9135 bp, Artificial Sequence
  Description of Artificial Sequence: Synthetic polynucleotide
tgcagctctggcccgtgtctcaaaatctctgatgttacattgcacaagataaaaatatatcatcatgaacaataaaactgtctgcttacataaacagtaatacaaggggtgttatgagccatattcaacgggaaacgtcgaggccgcgattaaattccaacatggatgctgatttatatgggtataaatgggctcgcgataatgtcgggcaatcaggtgcgacaatctatcgcttgtatgggaagcccgatgcgccagagttgtttctgaaacatggcaaaggtagcgttgccaatgatgttacagatgagatggtcagactaaactggctgacggaatttatgcctcttccgaccatcaagcattttatccgtactcctgatgatgcatggttactcaccactgcgatccccggaaaaacagcattccaggtattagaagaatatcctgattcaggtgaaaatattgttgatgcgctggcagtgttcctgcgccggttgcattcgattcctgtttgtaattgtccttttaacagcgatcgcgtatttcgtctcgctcaggcgcaatcacgaatgaataacggtttggttgatgcgagtgattttgatgacgagcgtaatggctggcctgttgaacaagtctggaaagaaatgcataaacttttgccattctcaccggattcagtcgtcactcatggtgatttctcacttgataaccttatttttgacgaggggaaattaataggttgtattgatgttggacgagtcggaatcgcagaccgataccaggatcttgccatcctatggaactgcctcggtgagttttctccttcattacagaaacggctttttcaaaaatatggtattgataatcctgatatgaataaattgcagtttcatttgatgctcgatgagtttttctaatcagaattggttaattggttgtaacattattcagattgggcttgatttaaaacttcatttttaatttaaaaggatctaggtgaagatcctttttgataatctcatgaccaaaatcccttaacgtgagttttcgttccactgagcgtcagaccccgtagaaaagatcaaaggatcttcttgagatcctttttttctgcgcgtaatctgctgcttgcaaacaaaaaaaccaccgctaccagcggtggtttgtttgccggatcaagagctaccaactctttttccgaaggtaactggcttcagcagagcgcagataccaaatactgttcttctagtgtagccgtagttaggccaccacttcaagaactctgtagcaccgcctacatacctcgctctgctaatcctgttaccagtggctgctgccagtggcgataagtcgtgtcttaccgggttggactcaagacgatagttaccggataaggcgcagcggtcgggctgaacggggggttcgtgcacacagcccagcttggagcgaacgacctacaccgaactgagatacctacagcgtgagctatgagaaagcgccacgcttcccgaagggagaaaggcggacaggtatccggtaagcggcagggtcggaacaggagagcgcacgagggagcttccagggggaaacgcctggtatctttatagtcctgtcgggtttcgccacctctgacttgagcgtcgatttttgtgatgctcgtcaggggggcggagcctatggaaaaacgccagcaacgcggcctttttacggttcctggccttttgctggccttttgctcacatgttctttcctgcgttatcccctgattctgtggataaccgtattaccgcctttgagtgagctgataccgctcgccgcagccgaacgaccgagcgcagcgagtcagtgagcgaggaagcggaagagcgcccaatacgcaaaccgcctctccccgcgcgttggccgattcattaatgcagctggcacgacaggtttcccgactggaaagcgggcagtgagcgcaacgcaattaatgtgagttagctcactcattaggcaccccaggctttacactttatgcttccggctcgtatgttgtgtggaattgtgagcggataacaatttcacacaggaaacagctatgaccatgattacaccaagcttgcatgcaggcctctgcagtcgaccagaagcaccatgtccttgggtccggcctgctgaatgcgcaggcggtcggccatgccccaggcttcgttttgacatcggcgcaggtctttgtagtagtcttgcatgagcctttctaccggcacttcttcttctccttcctcttgtcctgcatctcttgcatctatcgctgcggcggcggcggagtttggccgtaggtggcgccctcttcctcccatgcgtgtgaccccgaagcccctcatcggctgaagcagggctaggtcggcgacaacgcgctcggctaatatggcctgctgcacctgcgtgagggtagactggaagtcatccatgtccacaaagcggtggtatgcgcccgtgttgatggtgtaagtgcagttggccataacggaccagttaacggtctggtgacccggctgcgagagctcggtgtacctgagacgcgagtaagccctcgagtcaaatacgtagtcgttgcaagtccgcaccaggtactggtatcccaccaaaaagtgcggcggcggctggcggtagaggggccagcgtagggtggccggggctccgggggcgagatcttccaacataaggcgatgatatccgtagatgtacctggacatccaggtgatgccggcggcggtggtggaggcgcgcggaaagtcgcggacgcggttccagatgttgcgcagcggcaaaaagtgctccatggtcgggacgctctggccggtcaggcgcgcgcaatcgttgacgctctagcgtgcaaaaggagagcctgtaagcgggcactcttccgtggtctggtggataaattcgcaagggtatcatggcggacgaccggggttcgagccccgtatccggccgtccgccgtgatccatgcggttaccgcccgcgtgtcgaacccaggtgtgcgacgtcagacaacgggggagtgctccttttggcttccttccaggcgcggcggctgctgcgctagcttttttggccactggccgcgcgcagcgtaagcggttaggctggaaagcgaaagcattaagtggctcgctccctgtagccggagggttattttccaagggttgagtcgcgggacccccggttcgagtctcggaccgagactgggggcgtacactggatggcctttgcctggaacccgcactcaaaaacatgctacctctttgagccctttggcttttctgaccagcgactcaagcaggtttaccagtttgagtacgagtcactcctgcgccgtagcgccattgcttcttcccccgaccgctgtataacgctggaaaagtccacccaaagcgtacaggggcccaactcggccgcctgtggactattctgctgcatgtttctccacgcctttgccaactggccccaaactcccatggatcacaaccccaccatgaaccttattaccggggtacccaactccatgctcaacagtccccaggtacagcccaccctgcgtcgcaaccaggaacagctctacagcttcctggagcgccactcgccctacttccgcagccacagtgcgcagattaggagcgccacttctttttgtcacttgaaaaacatgtaaaaataatgtactagagacactttcaataaaggcaaatgcttttatttgtacactctcgggtgattatttacccccacccttgccgtctgcgccgtttaaaaatcaaaggggttctgccgcgcatcgctatgcgccactggcagggacacgttgcgatactggtgtttagtgctccacttaaactcaggcacaaccatccgcggcagctcggtgaagttttcactccacaggctgcgcaccatcaccaacgcgtttagcaggtcgggcgccgatatcttgaagtcgcagttggggcctccgccctgcgcgcgcgagttgcgatacacagggttgcagcactggaacactatcagcgccgggtggtgcacgctggccagcacgctcttgtcggagatcagatccgcgtccaggtcctccgcgttgctcagggcgaacggagtcaactttggtagctgccttcccaaaaagggcgcgtgcccaggctttgagttgcactcgcaccgtagtggcatcaaaaggtgaccgtgcccggtctgggcgttaggatacagcgcctgcataaaagccttgatctgcttaaaagccacctgagcctttgcgccttcagagaagaacatgccgcaagacttgccggaaaactgattggccggacaggccgcgtcgtgcacgcagcaccttgcgtcggtgttggagatctgcaccacatttcggccccaccggttcttcacgatcttggccttgctagactgctccttcagcgcgcgctgcccgttttcgctcgtcacatccatttcaatcacgtgctccttatttatcataatgcttccgtgtagacacttaagctcgccttcgatctcagcgcagcggtgcagccacaacgcgcagcccgtgggctcgtgatgcttgtaggtcacctctgcaaacgactgcaggtacgcctgcaggaatcgccccatcatcgtcacaaaggtcttgttgctggtgaaggtcagctgcaacccgcggtgctcctcgttcagccaggtcttgcatacggccgccagagcttccacttggtcaggcagtagtttgaagttcgcctttagatcgttatccacgtggtacttgtccatcagcgcgcgcgcagcctccatgcccttctcccacgcagacacgatcggcacactcagcgggttcatcaccgtaatttcactttccgcttcgctgggctcttcctcttcctcttgcgtccgcataccacgcgccactgggtcgtcttcattcagccgccgcactgtgcgcttacctcctttgccatgcttgattagcaccggtgggttgctgaaacccaccatttgtagcgccacatcttctctttcttcctcgctgtccacgattacctctggtgatggcgggcgctcgggcttgggagaagggcgcttctttttcttcttgggcgcaatggccaaatccgccgccgaggtcgatggccgcgggctgggtgtgcgcggcaccagcgcgtcttgtgatgagtcttcctcgtcctcggactcgatacgccgcctcatccgcttttttgggggcgcccggggaggcggcggcgacggggacggggacgacacgtcctccatggttgggggacgtcgcgccgcaccgcgtccgcgctcgggggtggtttcgcgctgctcctcttcccgactggccatttccttctcctataggcagaaaaagatccacaaaagcgaagatcagcttcggcgcacgctggaagacgcggaggctctcttcagtaaatactgcgcgctgactcttaaggactagtttcgcgccctttctcaaatttaagcgcgaaaactacgtcatctccagcggccacacccggcgccagcacctgttgtcagcgccattggcgcgccggccggccgaatatcttcatttaaatgtttaaacatcgatgcggccgccgtttgtgttatgtttcaacgtgtttatttttcaattgcagaaaatttcaagtcatttttcattcagtagtatagccccaccaccacatagcttatacagatcaccgtaccttaatcaaactcacagaaccctagtattcaacctgccacctccctcccaacacacagagtacacagtcctttctccccggctggccttaaaaagcatcatatcatgggtaacagacatattcttaggtgttatattccacacggtttcctgtcgagccaaacgctcatcagtgatattaataaactccccgggcagctcacttaagttcatgtcgctgtccagctgctgagccacaggctgctgtccaacttgcggttgcttaacgggcggcgaaggagaagtccacgcctacatgggggtagagtcataatcgtgcatcaggatagggcggtggtgctgcagcagcgcgcgaataaactgctgccgccgccgctccgtcctgcaggaatacaacatggcagtggtctcctcagcgatgattcgcaccgcccgcagcataaggcgccttgtcctccgggcacagcagcgcaccctgatctcacttaaatcagcacagtaactgcagcacagcaccacaatattgttcaaaatcccacagtgcaaggcgctgtatccaaagctcatggcggggaccacagaacccacgtggccatcataccacaagcgcaggtagattaagtggcgacccctcataaacacgctggacataaacattacctcttttggcatgttgtaattcaccacctcccggtaccatataaacctctgattaaacatggcgccatccaccaccatcctaaaccagctggccaaaacctgcccgccggctatacactgcagggaaccgggactggaacaatgacagtggagagcccaggactcgtaaccatggatcatcatgctcgtcatgatatcaatgttggcacaacacaggcacacgtgcatacacttcctcaggattacaagctcctcccgcgttagaaccatatcccagggaacaacccattcctgaatcagcgtaaatcccacactgcagggaagacctcgcacgtaactcacgttgtgcattgtcaaagtgttacattcgggcagcagcggatgatcctccagtatggtagcgcgggtttctgtctcaaaaggaggtagacgatccctactgtacggagtgcgccgagacaaccgagatcgtgttggtcgtagtgtcatgccaaatggaacgccggacgtagtcatatttcctgaagcaaaaccaggtgcgggcgtgacaaacagatctgcgtctccggtctcgccgcttagatcgctctgtgtagtagttgtagtatatccactctctcaaagcatccaggcgccccctggcttcgggttctatgtaaactccttcatgcgccgctgccctgataacatccaccaccgcagaataagccacacccagccaacctacacattcgttctgcgagtcacacacgggaggagcgggaagagctggaagaaccatgtttttttttttattccaaaagattatccaaaacctcaaaatgaagatctattaagtgaacgcgctcccctccggtggcgtggtcaaactctacagccaaagaacagataatggcatttgtaagatgttgcacaatggcttccaaaaggcaaacggccctcacgtccaagtggacgtaaaggctaaacccttcagggtgaatctcctctataaacattccagcaccttcaaccatgcccaaataattctcatctcgccaccttctcaatatatctctaagcaaatcccgaatattaagtccggccattgtaaaaatctgctccagagcgccctccaccttcagcctcaagcagcgaatcatgattgcaaaaattcaggttcctcacagacctgtataagattcaaaagcggaacattaacaaaaataccgcgatcccgtaggtcccttcgcagggccagctgaacataatcgtgcaggtctgcacggaccagcgcggccacttccccgccaggaaccatgacaaaagaacccacactgattatgacacgcatactcggagctatgctaaccagcgtagccccgatgtaagcttgttgcatgggcggcgatataaaatgcaaggtgctgctcaaaaaatcaggcaaagcctcgcgcaaaaaagaaagcacatcgtagtcatgctcatgcagataaaggcaggtaagctccggaaccaccacagaaaaagacaccatttttctctcaaacatgtctgcgggtttctgcataaacacaaaataaaataacaaaaaaacatttaaacattagaagcctgtcttacaacaggaaaaacaacccttataagcataagacggactacggccatgccggcgtgaccgtaaaaaaactggtcaccgtgattaaaaagcaccaccgacagctcctcggtcatgtccggagtcataatgtaagactcggtaaacacatcaggttgattcacatcggtcagtgctaaaaagcgaccgaaatagcccgggggaatacatacccgcaggcgtagagacaacattacagcccccataggaggtataacaaaattaataggagagaaaaacacataaacacctgaaaaaccctcctgcctaggcaaaatagcaccctcccgctccagaacaacatacagcgcttccacagcggcagccataacagtcagccttaccagtaaaaaagaaaacctattaaaaaaacaccactcgacacggcaccagctcaatcagtcacagtgtaaaaaagggccaagtgcagagcgagtatatataggactaaaaaatgacgtaacggttaaagtccacaaaaaacacccagaaaaccgcacgcgaacctacgcccagaaacgaaagccaaaaaacccacaacttcctcaaatcgtcacttccgttttcccacgttacgtcacttcccattttaagaaaactacaattcccaacacatacaagttactccgcccttaattaaatcggatccgatatctagatgtattcgcgaggtaccgagctcgaattctctggccgtcgttttacaacgtcgtgactgggaaaaccctggcgttacccaacttaatcgccttgcagcacatccccctttcgccagctggcgtaatagcgaagaggcccgcaccgatcgcccttcccaacagttgcgcagcctgaatggcgaatggcgcctgatgcggtattttctccttacgcatctgtgcggtatttcacaccgcatatggtgcactctcagtacaatctgctctgatgccgcatagttaagccagccccgacacccgccaacacccgctgacgcgccctgacgggcttgtctgctcccggcatccgcttacagacaagctgtgaccgtctccgggagctgcatgtgtcagaggttttcaccgtcatcaccgaaacgcgcga

SEQ ID NO: 43 - DNA, 8236 bp, Artificial Sequence
  Description of Artificial Sequence: Synthetic polynucleotide
tgcagctctggcccgtgtctcaaaatctctgatgttacattgcacaagataaaaatatatcatcatgaacaataaaactgtctgcttacataaacagtaatacaaggggtgttatgagccatattcaacgggaaacgtcgaggccgcgattaaattccaacatggatgctgatttatatgggtataaatgggctcgcgataatgtcgggcaatcaggtgcgacaatctatcgcttgtatgggaagcccgatgcgccagagttgtttctgaaacatggcaaaggtagcgttgccaatgatgttacagatgagatggtcagactaaactggctgacggaatttatgcctcttccgaccatcaagcattttatccgtactcctgatgatgcatggttactcaccactgcgatccccggaaaaacagcattccaggtattagaagaatatcctgattcaggtgaaaatattgttgatgcgctggcagtgttcctgcgccggttgcattcgattcctgtttgtaattgtccttttaacagcgatcgcgtatttcgtctcgctcaggcgcaatcacgaatgaataacggtttggttgatgcgagtgattttgatgacgagcgtaatggctggcctgttgaacaagtctggaaagaaatgcataaacttttgccattctcaccggattcagtcgtcactcatggtgatttctcacttgataaccttatttttgacgaggggaaattaataggttgtattgatgttggacgagtcggaatcgcagaccgataccaggatcttgccatcctatggaactgcctcggtgagttttctccttcattacagaaacggctttttcaaaaatatggtattgataatcctgatatgaataaattgcagtttcatttgatgctcgatgagtttttctaatcagaattggttaattggttgtaacattattcagattgggcttgatttaaaacttcatttttaatttaaaaggatctaggtgaagatcctttttgataatctcatgaccaaaatcccttaacgtgagttttcgttccactgagcgtcagaccccgtagaaaagatcaaaggatcttcttgagatcctttttttctgcgcgtaatctgctgcttgcaaacaaaaaaaccaccgctaccagcggtggtttgtttgccggatcaagagctaccaactctttttccgaaggtaactggcttcagcagagcgcagataccaaatactgttcttctagtgtagccgtagttaggccaccacttcaagaactctgtagcaccgcctacatacctcgctctgctaatcctgttaccagtggctgctgccagtggcgataagtcgtgtcttaccgggttggactcaagacgatagttaccggataaggcgcagcggtcgggctgaacggggggttcgtgcacacagcccagcttggagcgaacgacctacaccgaactgagatacctacagcgtgagctatgagaaagcgccacgcttcccgaagggagaaaggcggacaggtatccggtaagcggcagggtcggaacaggagagcgcacgagggagcttccagggggaaacgcctggtatctttatagtcctgtcgggtttcgccacctctgacttgagcgtcgatttttgtgatgctcgtcaggggggcggagcctatggaaaaacgccagcaacgcggcctttttacggttcctggccttttgctggccttttgctcacatgttctttcctgcgttatcccctgattctgtggataaccgtattaccgcctttgagtgagctgataccgctcgccgcagccgaacgaccgagcgcagcgagtcagtgagcgaggaagcggaagagcgcccaatacgcaaaccgcctctccccgcgcgttggccgattcattaatgcagctggcacgacaggtttcccgactggaaagcgggcagtgagcgcaacgcaattaatgtgagttagctcactcattaggcaccccaggctttacactttatgcttccggctcgtatgttgtgtggaattgtgagcggataacaatttcacacaggaaacagctatgaccatgattacaccaagcttgcatgcaggcctatccgtagatgtacctggacatccaggtgatgccggcggcggtggtggaggcgcgcggaaagtcgcggacgcggttccagatgttgcgcagcggcaaaaagtgctccatggtcgggacgctctggccggtgaggcgtgcgcagtcgttgacgctctagaccgtgcaaaaggagagcctgtaagcgggcactcttccgtggtctggtggataaattcgcaagggtatcatggcggacgaccggggttcgaaccccggatccggccgtccgccgtgatccatgcggttaccgcccgcgtgtcgaacccaggtgtgcgacgtcagacaacgggggagcgctccttttggcttccttccaggcgcggcggctgctgcgctagcttttttggccactggccgcgcgcggcgtaagcggttaggctggaaagcgaaagcattaagtggctcgctccctgtagccggagggttattttccaagggttgagtcgcaggacccccggttcgagtctcgggccggccggactgcggcgaacgggggtttgcctccccgtcatgcaagaccccgcttgcaaattcctccggaaacagggacgagccccttttttgcttttcccagatgcatccggtgctgcggcagatgcgcccccctcctcagcagcggcaagagcaagagcagcggcagacatgcagggcaccctccccttctcctaccgcgtcaggaggggcaacatctgtacactctcgggtgattatttacccccacccttgccgtctgcgccgtttaaaaatcaaaggggttctgccgcgcatcgctatgcgccactggcagggacacgttgcgatactggtgtttagtgctccacttaaactcaggcacaaccatccgcggcagctcggtgaagttttcactccacaggctgcgcaccatcaccaacgcgtttagcaggtcgggcgccgatatcttgaagtcgcagttggggcctccgccctgcgcgcgcgagttgcgatacacagggttgcagcactggaacactatcagcgccgggtggtgcacgctggccagcacgctcttgtcggagatcagatccgcgtccaggtcctccgcgttgctcagggcgaacggagtcaactttggtagctgccttcccaaaaagggcgcgtgcccaggctttgagttgcactcgcaccgtagtggcatcaaaaggtgaccgtgcccggtctgggcgttaggatacagcgcctgcataaaagccttgatctgcttaaaagccacctgagcctttgcgccttcagagaagaacatgccgcaagacttgccggaaaactgattggccggacaggccgcgtcgtgcacgcagcaccttgcgtcggtgttggagatctgcaccacatttcggccccaccggttcttcacgatcttggccttgctagactgctccttcagcgcgcgctgcccgttttcgctcgtcacatccatttcaatcacgtgctccttatttatcataatgcttccgtgtagacacttaagctcgccttcgatctcagcgcagcggtgcagccacaacgcgcagcccgtgggctcgtgatgcttgtaggtcacctctgcaaacgactgcaggtacgcctgcaggaatcgccccatcatcgtcacaaaggtcttgttgctggtgaaggtcagctgcaacccgcggtgctcctcgttcagccaggtcttgcatacggccgccagagcttccacttggtcaggcagtagtttgaagttcgcctttagatcgttatccacgtggtacttgtccatcagcgcgcgcgcagcctccatgcccttctcccacgcagacacgatcggcacactcagcgggttcatcaccgtaatttcactttccgcttcgctgggctcttcctcttcctcttgcgtccgcataccacgcgccactgggtcgtcttcattcagccgccgcactgtgcgcttacctcctttgccatgcttgattagcaccggtgggttgctgaaacccaccatttgtagcgccacatcttctctttcttcctcgctgtccacgattacctctggtgatggcgggcgctcgggcttgggagaagggcgcttctttttcttcttgggcgcaatggccaaatccgccgccgaggtcgatggccgcgggctgggtgtgcgcggcaccagcgcgtcttgtgatgagtcttcctcgtcctcggactcgatacgccgcctcatccgcttttttgggggcgcccggggaggcggcggcgacggggacggggacgacacgtcctccatggttgggggacgtcgcgccgcaccgcgtccgcgctcgggggtggtttcgcgctgctcctcttcccgactggccatttccttctcctataggcagaaaaagatccacaaaagcgaagatcagcttcggcgcacgctggaagacgcggaggctctcttcagtaaatactgcgcgctgactcttaaggactagtttcgcgccctttctcaaatttaagcgcgaaaactacgtcatctccagcggccacacccggcgccagcacctgttgtcagcgccattggcgcgccggccggccgaatatcttcatttaaatgtttaaacatcgatgcggccgccgtttgtgttatgtttcaacgtgtttatttttcaattgcagaaaatttcaagtcatttttcattcagtagtatagccccaccaccacatagcttatacagatcaccgtaccttaatcaaactcacagaaccctagtattcaacctgccacctccctcccaacacacagagtacacagtcctttctccccggctggccttaaaaagcatcatatcatgggtaacagacatattcttaggtgttatattccacacggtttcctgtcgagccaaacgctcatcagtgatattaataaactccccgggcagctcacttaagttcatgtcgctgtccagctgctgagccacaggctgctgtccaacttgcggttgcttaacgggcggcgaaggagaagtccacgcctacatgggggtagagtcataatcgtgcatcaggatagggcggtggtgctgcagcagcgcgcgaataaactgctgccgccgccgctccgtcctgcaggaatacaacatggcagtggtctcctcagcgatgattcgcaccgcccgcagcataaggcgccttgtcctccgggcacagcagcgcaccctgatctcacttaaatcagcacagtaactgcagcacagcaccacaatattgttcaaaatcccacagtgcaaggcgctgtatccaaagctcatggcggggaccacagaacccacgtggccatcataccacaagcgcaggtagattaagtggcgacccctcataaacacgctggacataaacattacctcttttggcatgttgtaattcaccacctcccggtaccatataaacctctgattaaacatggcgccatccaccaccatcctaaaccagctggccaaaacctgcccgccggctatacactgcagggaaccgggactggaacaatgacagtggagagcccaggactcgtaaccatggatcatcatgctcgtcatgatatcaatgttggcacaacacaggcacacgtgcatacacttcctcaggattacaagctcctcccgcgttagaaccatatcccagggaacaacccattcctgaatcagcgtaaatcccacactgcagggaagacctcgcacgtaactcacgttgtgcattgtcaaagtgttacattcgggcagcagcggatgatcctccagtatggtagcgcgggtttctgtctcaaaaggaggtagacgatccctactgtacggagtgcgccgagacaaccgagatcgtgttggtcgtagtgtcatgccaaatggaacgccggacgtagtcatatttcctgaagcaaaaccaggtgcgggcgtgacaaacagatctgcgtctccggtctcgccgcttagatcgctctgtgtagtagttgtagtatatccactctctcaaagcatccaggcgccccctggcttcgggttctatgtaaactccttcatgcgccgctgccctgataacatccaccaccgcagaataagccacacccagccaacctacacattcgttctgcgagtcacacacgggaggagcgggaagagctggaagaaccatgtttttttttttattccaaaagattatccaaaacctcaaaatgaagatctattaagtgaacgcgctcccctccggtggcgtggtcaaactctacagccaaagaacagataatggcatttgtaagatgttgcacaatggcttccaaaaggcaaacggccctcacgtccaagtggacgtaaaggctaaacccttcagggtgaatctcctctataaacattccagcaccttcaaccatgcccaaataattctcatctcgccaccttctcaatatatctctaagcaaatcccgaatattaagtccggccattgtaaaaatctgctccagagcgccctccaccttcagcctcaagcagcgaatcatgattgcaaaaattcaggttcctcacagacctgtataagattcaaaagcggaacattaacaaaaataccgcgatcccgtaggtcccttcgcagggccagctgaacataatcgtgcaggtctgcacggaccagcgcggccacttccccgccaggaaccatgacaaaagaacccacactgattatgacacgcatactcggagctatgctaaccagcgtagccccgatgtaagcttgttgcatgggcggcgatataaaatgcaaggtgctgctcaaaaaatcaggcaaagcctcgcgcaaaaaagaaagcacatcgtagtcatgctcatgcagataaaggcaggtaagctccggaaccaccacagaaaaagacaccatttttctctcaaacatgtctgcgggtttctgcataaacacaaaataaaataacaaaaaaacatttaaacattagaagcctgtcttacaacaggaaaaacaacccttataagcataagacggactacggccatgccggcgtgaccgtaaaaaaactggtcaccgtgattaaaaagcaccaccgacagctcctcggtcatgtccggagtcataatgtaagactcggtaaacacatcaggttgattcacatcggtcagtgctaaaaagcgaccgaaatagcccgggggaatacatacccgcaggcgtagagacaacattacagcccccataggaggtataacaaaattaataggagagaaaaacacataaacacctgaaaaaccctcctgcctaggcaaaatagcaccctcccgctccagaacaacatacagcgcttccacagcggcagccataacagtcagccttaccagtaaaaaagaaaacctattaaaaaaacaccactcgacacggcaccagctcaatcagtcacagtgtaaaaaagggccaagtgcagagcgagtatatataggactaaaaaatgacgtaacggttaaagtccacaaaaaacacccagaaaaccgcacgcgaacctacgcccagaaacgaaagccaaaaaacccacaacttcctcaaatcgtcacttccgttttcccacgttacgtcacttcccattttaagaaaactacaattcccaacacatacaagttactccgcccttaattaaatcggatccgatatctagatgtattcgcgaggtaccgagctcgaattctctggccgtcgttttacaacgtcgtgactgggaaaaccctggcgttacccaacttaatcgccttgcagcacatccccctttcgccagctggcgtaatagcgaagaggcccgcaccgatcgcccttcccaacagttgcgcagcctgaatggcgaatggcgcctgatgcggtattttctccttacgcatctgtgcggtatttcacaccgcatatggtgcactctcagtacaatctgctctgatgccgcatagttaagccagccccgacacccgccaacacccgctgacgcgccctgacgggcttgtctgctcccggcatccgcttacagacaagctgtgaccgtctccgggagctgcatgtgtcagaggttttcaccgtcatcaccgaaacgcgcga

SEQ ID NO: 44 - DNA, 8371 bp, Artificial Sequence
  Description of Artificial Sequence: Synthetic polynucleotide
tgcagctctggcccgtgtctcaaaatctctgatgttacattgcacaagataaaaatatatcatcatgaacaataaaactgtctgcttacataaacagtaatacaaggggtgttatgagccatattcaacgggaaacgtcgaggccgcgattaaattccaacatggatgctgatttatatgggtataaatgggctcgcgataatgtcgggcaatcaggtgcgacaatctatcgcttgtatgggaagcccgatgcgccagagttgtttctgaaacatggcaaaggtagcgttgccaatgatgttacagatgagatggtcagactaaactggctgacggaatttatgcctcttccgaccatcaagcattttatccgtactcctgatgatgcatggttactcaccactgcgatccccggaaaaacagcattccaggtattagaagaatatcctgattcaggtgaaaatattgttgatgcgctggcagtgttcctgcgccggttgcattcgattcctgtttgtaattgtccttttaacagcgatcgcgtatttcgtctcgctcaggcgcaatcacgaatgaataacggtttggttgatgcgagtgattttgatgacgagcgtaatggctggcctgttgaacaagtctggaaagaaatgcataaacttttgccattctcaccggattcagtcgtcactcatggtgatttctcacttgataaccttatttttgacgaggggaaattaataggttgtattgatgttggacgagtcggaatcgcagaccgataccaggatcttgccatcctatggaactgcctcggtgagttttctccttcattacagaaacggctttttcaaaaatatggtattgataatcctgatatgaataaattgcagtttcatttgatgctcgatgagtttttctaatcagaattggttaattggttgtaacattattcagattgggcttgatttaaaacttcatttttaatttaaaaggatctaggtgaagatcctttttgataatctcatgaccaaaatcccttaacgtgagttttcgttccactgagcgtcagaccccgtagaaaagatcaaaggatcttcttgagatcctttttttctgcgcgtaatctgctgcttgcaaacaaaaaaaccaccgctaccagcggtggtttgtttgccggatcaagagctaccaactctttttccgaaggtaactggcttcagcagagcgcagataccaaatactgttcttctagtgtagccgtagttaggccaccacttcaagaactctgtagcaccgcctacatacctcgctctgctaatcctgttaccagtggctgctgccagtggcgataagtcgtgtcttaccgggttggactcaagacgatagttaccggataaggcgcagcggtcgggctgaacggggggttcgtgcacacagcccagcttggagcgaacgacctacaccgaactgagatacctacagcgtgagctatgagaaagcgccacgcttcccgaagggagaaaggcggacaggtatccggtaagcggcagggtcggaacaggagagcgcacgagggagcttccagggggaaacgcctggtatctttatagtcctgtcgggtttcgccacctctgacttgagcgtcgatttttgtgatgctcgtcaggggggcggagcctatggaaaaacgccagcaacgcggcctttttacggttcctggccttttgctggccttttgctcacatgttctttcctgcgttatcccctgattctgtggataaccgtattaccgcctttgagtgagctgataccgctcgccgcagccgaacgaccgagcgcagcgagtcagtgagcgaggaagcggaagagcgcccaatacgcaaaccgcctctccccgcgcgttggccgattcattaatgcagctggcacgacaggtttcccgactggaaagcgggcagtgagcgcaacgcaattaatgtgagttagctcactcattaggcaccccaggctttacactttatgcttccggctcgtatgttgtgtggaattgtgagcggataacaatttcacacaggaaacagctatgaccatgattacaccaagcttgcatgcaggcctatccgtagatgtacctggacatccaggtgatgccggcggcggtggtggaggcgcgcggaaagtcgcggacgcggttccagatgttgcgcagcggcaaaaagtgctccatggtcgggacgctctggccggtgaggcgtgcgcagtcgttgacgctctagaccgtgcaaaaggagagcctgtaagcgggcactcttccgtggtctggtggataaattcgcaagggtatcatggcggacgaccggggttcgaaccccggatccggccgtccgccgtgatccatgcggttaccgcccgcgtgtcgaacccaggtgtgcgacgtcagacaacgggggagcgctccttttggcttccttccaggcgcggcggctgctgcgctagcttttttggccactggccgcgcgcggcgtaagcggttaggctggaaagcgaaagcattaagtggctcgctccctgtagccggagggttattttccaagggttgagtcgcaggacccccggttcgagtctcgggccggccggactgcggcgaacgggggtttgcctccccgtcatgcaagaccccgcttgcaaattcctccggaaacagggacgagccccttttttgcttttcccagatgcatccggtgctgcggcagatgcgcccccctcctcagcagcggcaagagcaagagcagcggcagacatgcagggcaccctccccttctcctaccgcgtcaggaggggcaacatcgatccagacatgataagatacattgatgagtttggacaaaccacaactagaatgcagtgaaaaaaatgctttatttgtgaaatttgtgatgctattgctttatttgtaaccattataagctgcaataaacaagtttgtacactctcgggtgattatttacccccacccttgccgtctgcgccgtttaaaaatcaaaggggttctgccgcgcatcgctatgcgccactggcagggacacgttgcgatactggtgtttagtgctccacttaaactcaggcacaaccatccgcggcagctcggtgaagttttcactccacaggctgcgcaccatcaccaacgcgtttagcaggtcgggcgccgatatcttgaagtcgcagttggggcctccgccctgcgcgcgcgagttgcgatacacagggttgcagcactggaacactatcagcgccgggtggtgcacgctggccagcacgctcttgtcggagatcagatccgcgtccaggtcctccgcgttgctcagggcgaacggagtcaactttggtagctgccttcccaaaaagggcgcgtgcccaggctttgagttgcactcgcaccgtagtggcatcaaaaggtgaccgtgcccggtctgggcgttaggatacagcgcctgcataaaagccttgatctgcttaaaagccacctgagcctttgcgccttcagagaagaacatgccgcaagacttgccggaaaactgattggccggacaggccgcgtcgtgcacgcagcaccttgcgtcggtgttggagatctgcaccacatttcggccccaccggttcttcacgatcttggccttgctagactgctccttcagcgcgcgctgcccgttttcgctcgtcacatccatttcaatcacgtgctccttatttatcataatgcttccgtgtagacacttaagctcgccttcgatctcagcgcagcggtgcagccacaacgcgcagcccgtgggctcgtgatgcttgtaggtcacctctgcaaacgactgcaggtacgcctgcaggaatcgccccatcatcgtcacaaaggtcttgttgctggtgaaggtcagctgcaacccgcggtgctcctcgttcagccaggtcttgcatacggccgccagagcttccacttggtcaggcagtagtttgaagttcgcctttagatcgttatccacgtggtacttgtccatcagcgcgcgcgcagcctccatgcccttctcccacgcagacacgatcggcacactcagcgggttcatcaccgtaatttcactttccgcttcgctgggctcttcctcttcctcttgcgtccgcataccacgcgccactgggtcgtcttcattcagccgccgcactgtgcgcttacctcctttgccatgcttgattagcaccggtgggttgctgaaacccaccatttgtagcgccacatcttctctttcttcctcgctgtccacgattacctctggtgatggcgggcgctcgggcttgggagaagggcgcttctttttcttcttgggcgcaatggccaaatccgccgccgaggtcgatggccgcgggctgggtgtgcgcggcaccagcgcgtcttgtgatgagtcttcctcgtcctcggactcgatacgccgcctcatccgcttttttgggggcgcccggggaggcggcggcgacggggacggggacgacacgtcctccatggttgggggacgtcgcgccgcaccgcgtccgcgctcgggggtggtttcgcgctgctcctcttcccgactggccatttccttctcctataggcagaaaaagatccacaaaagcgaagatcagcttcggcgcacgctggaagacgcggaggctctcttcagtaaatactgcgcgctgactcttaaggactagtttcgcgccctttctcaaatttaagcgcgaaaactacgtcatctccagcggccacacccggcgccagcacctgttgtcagcgccattggcgcgccggccggccgaatatcttcatttaaatgtttaaacatcgatgcggccgccgtttgtgttatgtttcaacgtgtttatttttcaattgcagaaaatttcaagtcatttttcattcagtagtatagccccaccaccacatagcttatacagatcaccgtaccttaatcaaactcacagaaccctagtattcaacctgccacctccctcccaacacacagagtacacagtcctttctccccggctggccttaaaaagcatcatatcatgggtaacagacatattcttaggtgttatattccacacggtttcctgtcgagccaaacgctcatcagtgatattaataaactccccgggcagctcacttaagttcatgtcgctgtccagctgctgagccacaggctgctgtccaacttgcggttgcttaacgggcggcgaaggagaagtccacgcctacatgggggtagagtcataatcgtgcatcaggatagggcggtggtgctgcagcagcgcgcgaataaactgctgccgccgccgctccgtcctgcaggaatacaacatggcagtggtctcctcagcgatgattcgcaccgcccgcagcataaggcgccttgtcctccgggcacagcagcgcaccctgatctcacttaaatcagcacagtaactgcagcacagcaccacaatattgttcaaaatcccacagtgcaaggcgctgtatccaaagctcatggcggggaccacagaacccacgtggccatcataccacaagcgcaggtagattaagtggcgacccctcataaacacgctggacataaacattacctcttttggcatgttgtaattcaccacctcccggtaccatataaacctctgattaaacatggcgccatccaccaccatcctaaaccagctggccaaaacctgcccgccggctatacactgcagggaaccgggactggaacaatgacagtggagagcccaggactcgtaaccatggatcatcatgctcgtcatgatatcaatgttggcacaacacaggcacacgtgcatacacttcctcaggattacaagctcctcccgcgttagaaccatatcccagggaacaacccattcctgaatcagcgtaaatcccacactgcagggaagacctcgcacgtaactcacgttgtgcattgtcaaagtgttacattcgggcagcagcggatgatcctccagtatggtagcgcgggtttctgtctcaaaaggaggtagacgatccctactgtacggagtgcgccgagacaaccgagatcgtgttggtcgtagtgtcatgccaaatggaacgccggacgtagtcatatttcctgaagcaaaaccaggtgcgggcgtgacaaacagatctgcgtctccggtctcgccgcttagatcgctctgtgtagtagttgtagtatatccactctctcaaagcatccaggcgccccctggcttcgggttctatgtaaactccttcatgcgccgctgccctgataacatccaccaccgcagaataagccacacccagccaacctacacattcgttctgcgagtcacacacgggaggagcgggaagagctggaagaaccatgtttttttttttattccaaaagattatccaaaacctcaaaatgaagatctattaagtgaacgcgctcccctccggtggcgtggtcaaactctacagccaaagaacagataatggcatttgtaagatgttgcacaatggcttccaaaaggcaaacggccctcacgtccaagtggacgtaaaggctaaacccttcagggtgaatctcctctataaacattccagcaccttcaaccatgcccaaataattctcatctcgccaccttctcaatatatctctaagcaaatcccgaatattaagtccggccattgtaaaaatctgctccagagcgccctccaccttcagcctcaagcagcgaatcatgattgcaaaaattcaggttcctcacagacctgtataagattcaaaagcggaacattaacaaaaataccgcgatcccgtaggtcccttcgcagggccagctgaacataatcgtgcaggtctgcacggaccagcgcggccacttccccgccaggaaccatgacaaaagaacccacactgattatgacacgcatactcggagctatgctaaccagcgtagccccgatgtaagcttgttgcatgggcggcgatataaaatgcaaggtgctgctcaaaaaatcaggcaaagcctcgcgcaaaaaagaaagcacatcgtagtcatgctcatgcagataaaggcaggtaagctccggaaccaccacagaaaaagacaccatttttctctcaaacatgtctgcgggtttctgcataaacacaaaataaaataacaaaaaaacatttaaacattagaagcctgtcttacaacaggaaaaacaacccttataagcataagacggactacggccatgccggcgtgaccgtaaaaaaactggtcaccgtgattaaaaagcaccaccgacagctcctcggtcatgtccggagtcataatgtaagactcggtaaacacatcaggttgattcacatcggtcagtgctaaaaagcgaccgaaatagcccgggggaatacatacccgcaggcgtagagacaacattacagcccccataggaggtataacaaaattaataggagagaaaaacacataaacacctgaaaaaccctcctgcctaggcaaaatagcaccctcccgctccagaacaacatacagcgcttccacagcggcagccataacagtcagccttaccagtaaaaaagaaaacctattaaaaaaacaccactcgacacggcaccagctcaatcagtcacagtgtaaaaaagggccaagtgcagagcgagtatatataggactaaaaaatgacgtaacggttaaagtccacaaaaaacacccagaaaaccgcacgcgaacctacgcccagaaacgaaagccaaaaaacccacaacttcctcaaatcgtcacttccgttttcccacgttacgtcacttcccattttaagaaaactacaattcccaacacatacaagttactccgcccttaattaaatcggatccgatatctagatgtattcgcgaggtaccgagctcgaattctctggccgtcgttttacaacgtcgtgactgggaaaaccctggcgttacccaacttaatcgccttgcagcacatccccctttcgccagctggcgtaatagcgaagaggcccgcaccgatcgcccttcccaacagttgcgcagcctgaatggcgaatggcgcctgatgcggtattttctccttacgcatctgtgcggtatttcacaccgcatatggtgcactctcagtacaatctgctctgatgccgcatagttaagccagccccgacacccgccaacacccgctgacgcgccctgacgggcttgtctgctcccggcatccgcttacagacaagctgtgaccgtctccgggagctgcatgtgtcagaggttttcaccgtcatcaccgaaacgcgcga

SEQ ID NO: 45 - DNA, 8888 bp, Artificial Sequence
  Description of Artificial Sequence: Synthetic polynucleotide
tgcagctctggcccgtgtctcaaaatctctgatgttacattgcacaagataaaaatatatcatcatgaacaataaaactgtctgcttacataaacagtaatacaaggggtgttatgagccatattcaacgggaaacgtcgaggccgcgattaaattccaacatggatgctgatttatatgggtataaatgggctcgcgataatgtcgggcaatcaggtgcgacaatctatcgcttgtatgggaagcccgatgcgccagagttgtttctgaaacatggcaaaggtagcgttgccaatgatgttacagatgagatggtcagactaaactggctgacggaatttatgcctcttccgaccatcaagcattttatccgtactcctgatgatgcatggttactcaccactgcgatccccggaaaaacagcattccaggtattagaagaatatcctgattcaggtgaaaatattgttgatgcgctggcagtgttcctgcgccggttgcattcgattcctgtttgtaattgtccttttaacagcgatcgcgtatttcgtctcgctcaggcgcaatcacgaatgaataacggtttggttgatgcgagtgattttgatgacgagcgtaatggctggcctgttgaacaagtctggaaagaaatgcataaacttttgccattctcaccggattcagtcgtcactcatggtgatttctcacttgataaccttatttttgacgaggggaaattaataggttgtattgatgttggacgagtcggaatcgcagaccgataccaggatcttgccatcctatggaactgcctcggtgagttttctccttcattacagaaacggctttttcaaaaatatggtattgataatcctgatatgaataaattgcagtttcatttgatgctcgatgagtttttctaatcagaattggttaattggttgtaacattattcagattgggcttgatttaaaacttcatttttaatttaaaaggatctaggtgaagatcctttttgataatctcatgaccaaaatcccttaacgtgagttttcgttccactgagcgtcagaccccgtagaaaagatcaaaggatcttcttgagatcctttttttctgcgcgtaatctgctgcttgcaaacaaaaaaaccaccgctaccagcggtggtttgtttgccggatcaagagctaccaactctttttccgaaggtaactggcttcagcagagcgcagataccaaatactgttcttctagtgtagccgtagttaggccaccacttcaagaactctgtagcaccgcctacatacctcgctctgctaatcctgttaccagtggctgctgccagtggcgataagtcgtgtcttaccgggttggactcaagacgatagttaccggataaggcgcagcggtcgggctgaacggggggttcgtgcacacagcccagcttggagcgaacgacctacaccgaactgagatacctacagcgtgagctatgagaaagcgccacgcttcccgaagggagaaaggcggacaggtatccggtaagcggcagggtcggaacaggagagcgcacgagggagcttccagggggaaacgcctggtatctttatagtcctgtcgggtttcgccacctctgacttgagcgtcgatttttgtgatgctcgtcaggggggcggagcctatggaaaaacgccagcaacgcggcctttttacggttcctggccttttgctggccttttgctcacatgttctttcctgcgttatcccctgattctgtggataaccgtattaccgcctttgagtgagctgataccgctcgccgcagccgaacgaccgagcgcagcgagtcagtgagcgaggaagcggaagagcgcccaatacgcaaaccgcctctccccgcgcgttggccgattcattaatgcagctggcacgacaggtttcccgactggaaagcgggcagtgagcgcaacgcaattaatgtgagttagctcactcattaggcaccccaggctttacactttatgcttccggctcgtatgttgtgtggaattgtgagcggataacaatttcacacaggaaacagctatgaccatgattacaccaagcttgcatgcaggcctctgcagtcgaccagaagcaccatgtccttgggtccggcctgctgaatgcgcaggcggtcggccatgccccaggcttcgttttgacatcggcgcaggtctttgtagtagtcttgcatgagcctttctaccggcacttcttcttctccttcctcttgtcctgcatctcttgcatctatcgctgcggcggcggcggagtttggccgtaggtggcgccctcttcctcccatgcgtgtgaccccgaagcccctcatcggctgaagcagggctaggtcggcgacaacgcgctcggctaatatggcctgctgcacctgcgtgagggtagactggaagtcatccatgtccacaaagcggtggtatgcgcccgtgttgatggtgtaagtgcagttggccataacggaccagttaacggtctggtgacccggctgcgagagctcggtgtacctgagacgcgagtaagccctcgagtcaaatacgtagtcgttgcaagtccgcaccaggtactggtatcccaccaaaaagtgcggcggcggctggcggtagaggggccagcgtagggtggccggggctccgggggcgagatcttccaacataaggcgatgatatccgtagatgtacctggacatccaggtgatgccggcggcggtggtggaggcgcgcggaaagtcgcggacgcggttccagatgttgcgcagcggcaaaaagtgctccatggtcgggacgctctggccggtcaggcgcgcgcaatcgttgacgctctagcgtgcaaaaggagagcctgtaagcgggcactcttccgtggtctggtggataaattcgcaagggtatcatggcggacgaccggggttcgagccccgtatccggccgtccgccgtgatccatgcggttaccgcccgcgtgtcgaacccaggtgtgcgacgtcagacaacgggggagtgctccttttggcttccttccaggcgcggcggctgctgcgctagcttttttggccactggccgcgcgcagcgtaagcggttaggctggaaagcgaaagcattaagtggctcgctccctgtagccggagggttattttccaagggttgagtcgcgggacccccggttcgagtctcggaccgagactgggggcgtacactggatggcctttgcctggaacccgcactcaaaaacatgctacctctttgagccctttggcttttctgaccagcgactcaagcaggtttaccagtttgagtacgagtcactcctgcgccgtagcgccattgcttcttcccccgaccgctgtataacgctggaaaagtccacccaaagcgtacaggggcccaactcggccgcctgtggactattctgctgcatgtttctccacgcctttgccaactggccccaaactcccatggatcacaaccccaccatgaaccttattaccggggtacccaactccatgctcaacagtccccaggtacagcccaccctgcgtcgcaaccaggaacagctctacagcttcctggagcgccactcgccctacttccgcagccacagtgcgcagattaggagcgccacttctttttgtcacttgaaaaacatgtaaaaataatgtactagagacactttcaataaaggcaaatgcttttatttgtacactctcgggtgattatttacccccacccttgccgtctgcgccgtttaaaaatcaaaggggttctgccgcgcatcgctatgcgccactggcagggacacgttgcgatactggtgtttagtgctccacttaaactcaggcacaaccatccgcggcagctcggtgaagttttcactccacaggctgcgcaccatcaccaacgcgtttagcaggtcgggcgccgatatcttgaagtcgcagttggggcctccgccctgcgcgcgcgagttgcgatacacagggttgcagcactggaacactatcagcgccgggtggtgcacgctggccagcacgctcttgtcggagatcagatccgcgtccaggtcctccgcgttgctcagggcgaacggagtcaactttggtagctgccttcccaaaaagggcgcgtgcccaggctttgagttgcactcgcaccgtagtggcatcaaaaggtgaccgtgcccggtctgggcgttaggatacagcgcctgcataaaagccttgatctgcttaaaagccacctgagcctttgcgccttcagagaagaacatgccgcaagacttgccggaaaactgattggccggacaggccgcgtcgtgcacgcagcaccttgcgtcggtgttggagatctgcaccacatttcggccccaccggttcttcacgatcttggccttgctagactgctccttcagcgcgcgctgcccgttttcgctcgtcacatccatttcaatcacgtgctccttatttatcataatgcttccgtgtagacacttaagctcgccttcgatctcagcgcagcggtgcagccacaacgcgcagcccgtgggctcgtgatgcttgtaggtcacctctgcaaacgactgcaggtacgcctgcaggaatcgccccatcatcgtcacaaaggtcttgttgctggtgaaggtcagctgcaacccgcggtgctcctcgttcagccaggtcttgcatacggccgccagagcttccacttggtcaggcagtagtttgaagttcgcctttagatcgttatccacgtggtacttgtccatcagcgcgcgcgcagcctccatgcccttctcccacgcagacacgatcggcacactcagcgggttcatcaccgtaatttcactttccgcttcgctgggctcttcctcttcctcttgcgtccgcataccacgcgccactgggtcgtcttcattcagccgccgcactgtgcgcttacctcctttgccatgcttgattagcaccggtgggttgctgaaacccaccatttgtagcgccacatcttctctttcttcctcgctgtccacgattacctctggtgatggcgggcgctcgggcttgggagaagggcgcttctttttcttcttgggcgcaatggccaaatccgccgccgaggtcgatggccgcgggctgggtgtgcgcggcaccagcgcgtcttgtgatgagtcttcctcgtcctcggactcgatacgccgcctcatccgcttttttgggggcgcccggggaggcggcggcgacggggacggggacgacacgtcctccatggttgggggacgtcgcgccgcaccgcgtccgcgctcgggggtggtttcgcgctgctcctcttcccgactggccatttccttctcctataggcagaaaaagatccacaaaagcgaagatcagcttcggcgcacgctggaagacgcggaggctctcttcagtaaatactgcgcgctgactcttaaggactagtttcgcgccctttctcaaatttaagcgcgaaaactacgtcatctccagcggccacacccggcgccagcacctgttgtcagcgccattggcgcgccggccggccgaatatcttcatttaaatgtttaaacatcgatgcggccgcaacttgtttattgcagcttataatggttacaaataaagcaatagcatcacaaatttcacaaataaagcatttttttcactgcattctagttgtggtttgtccaaactcatcaatgtatcttagcttaacgggcggcgaaggagaagtccacgcctacatgggggtagagtcataatcgtgcatcaggatagggcggtggtgctgcagcagcgcgcgaataaactgctgccgccgccgctccgtcctgcaggaatacaacatggcagtggtctcctcagcgatgattcgcaccgcccgcagcataaggcgccttgtcctccgggcacagcagcgcaccctgatctcacttaaatcagcacagtaactgcagcacagcaccacaatattgttcaaaatcccacagtgcaaggcgctgtatccaaagctcatggcggggaccacagaacccacgtggccatcataccacaagcgcaggtagattaagtggcgacccctcataaacacgctggacataaacattacctcttttggcatgttgtaattcaccacctcccggtaccatataaacctctgattaaacatggcgccatccaccaccatcctaaaccagctggccaaaacctgcccgccggctatacactgcagggaaccgggactggaacaatgacagtggagagcccaggactcgtaaccatggatcatcatgctcgtcatgatatcaatgttggcacaacacaggcacacgtgcatacacttcctcaggattacaagctcctcccgcgttagaaccatatcccagggaacaacccattcctgaatcagcgtaaatcccacactgcagggaagacctcgcacgtaactcacgttgtgcattgtcaaagtgttacattcgggcagcagcggatgatcctccagtatggtagcgcgggtttctgtctcaaaaggaggtagacgatccctactgtacggagtgcgccgagacaaccgagatcgtgttggtcgtagtgtcatgccaaatggaacgccggacgtagtcatatttcctgaagcaaaaccaggtgcgggcgtgacaaacagatctgcgtctccggtctcgccgcttagatcgctctgtgtagtagttgtagtatatccactctctcaaagcatccaggcgccccctggcttcgggttctatgtaaactccttcatgcgccgctgccctgataacatccaccaccgcagaataagccacacccagccaacctacacattcgttctgcgagtcacacacgggaggagcgggaagagctggaagaaccatgtttttttttttattccaaaagattatccaaaacctcaaaatgaagatctattaagtgaacgcgctcccctccggtggcgtggtcaaactctacagccaaagaacagataatggcatttgtaagatgttgcacaatggcttccaaaaggcaaacggccctcacgtccaagtggacgtaaaggctaaacccttcagggtgaatctcctctataaacattccagcaccttcaaccatgcccaaataattctcatctcgccaccttctcaatatatctctaagcaaatcccgaatattaagtccggccattgtaaaaatctgctccagagcgccctccaccttcagcctcaagcagcgaatcatgattgcaaaaattcaggttcctcacagacctgtataagattcaaaagcggaacattaacaaaaataccgcgatcccgtaggtcccttcgcagggccagctgaacataatcgtgcaggtctgcacggaccagcgcggccacttccccgccaggaaccatgacaaaagaacccacactgattatgacacgcatactcggagctatgctaaccagcgtagccccgatgtaagcttgttgcatgggcggcgatataaaatgcaaggtgctgctcaaaaaatcaggcaaagcctcgcgcaaaaaagaaagcacatcgtagtcatgctcatgcagataaaggcaggtaagctccggaaccaccacagaaaaagacaccatttttctctcaaacatgtctgcgggtttctgcataaacacaaaataaaataacaaaaaaacatttaaacattagaagcctgtcttacaacaggaaaaacaacccttataagcataagacggactacggccatgccggcgtgaccgtaaaaaaactggtcaccgtgattaaaaagcaccaccgacagctcctcggtcatgtccggagtcataatgtaagactcggtaaacacatcaggttgattcacatcggtcagtgctaaaaagcgaccgaaatagcccgggggaatacatacccgcaggcgtagagacaacattacagcccccataggaggtataacaaaattaataggagagaaaaacacataaacacctgaaaaaccctcctgcctaggcaaaatagcaccctcccgctccagaacaacatacagcgcttccacagcggcagccataacagtcagccttaccagtaaaaaagaaaacctattaaaaaaacaccactcgacacggcaccagctcaatcagtcacagtgtaaaaaagggccaagtgcagagcgagtatatataggactaaaaaatgacgtaacggttaaagtccacaaaaaacacccagaaaaccgcacgcgaacctacgcccagaaacgaaagccaaaaaacccacaacttcctcaaatcgtcacttccgttttcccacgttacgtcacttcccattttaagaaaactacaattcccaacacatacaagttactccgcccttaattaaatcggatccgatatctagatgtattcgcgaggtaccgagctcgaattctctggccgtcgttttacaacgtcgtgactgggaaaaccctggcgttacccaacttaatcgccttgcagcacatccccctttcgccagctggcgtaatagcgaagaggcccgcaccgatcgcccttcccaacagttgcgcagcctgaatggcgaatggcgcctgatgcggtattttctccttacgcatctgtgcggtatttcacaccgcatatggtgcactctcagtacaatctgctctgatgccgcatagttaagccagccccgacacccgccaacacccgctgacgcgccctgacgggcttgtctgctcccggcatccgcttacagacaagctgtgaccgtctccgggagctgcatgtgtcagaggttttcaccgtcatcaccgaaacgcgcga

SEQ ID NO: 46 - DNA, 7989 bp, Artificial Sequence
  Description of Artificial Sequence: Synthetic polynucleotide
tgcagctctggcccgtgtctcaaaatctctgatgttacattgcacaagataaaaatatatcatcatgaacaataaaactgtctgcttacataaacagtaatacaaggggtgttatgagccatattcaacgggaaacgtcgaggccgcgattaaattccaacatggatgctgatttatatgggtataaatgggctcgcgataatgtcgggcaatcaggtgcgacaatctatcgcttgtatgggaagcccgatgcgccagagttgtttctgaaacatggcaaaggtagcgttgccaatgatgttacagatgagatggtcagactaaactggctgacggaatttatgcctcttccgaccatcaagcattttatccgtactcctgatgatgcatggttactcaccactgcgatccccggaaaaacagcattccaggtattagaagaatatcctgattcaggtgaaaatattgttgatgcgctggcagtgttcctgcgccggttgcattcgattcctgtttgtaattgtccttttaacagcgatcgcgtatttcgtctcgctcaggcgcaatcacgaatgaataacggtttggttgatgcgagtgattttgatgacgagcgtaatggctggcctgttgaacaagtctggaaagaaatgcataaacttttgccattctcaccggattcagtcgtcactcatggtgatttctcacttgataaccttatttttgacgaggggaaattaataggttgtattgatgttggacgagtcggaatcgcagaccgataccaggatcttgccatcctatggaactgcctcggtgagttttctccttcattacagaaacggctttttcaaaaatatggtattgataatcctgatatgaataaattgcagtttcatttgatgctcgatgagtttttctaatcagaattggttaattggttgtaacattattcagattgggcttgatttaaaacttcatttttaatttaaaaggatctaggtgaagatcctttttgataatctcatgaccaaaatcccttaacgtgagttttcgttccactgagcgtcagaccccgtagaaaagatcaaaggatcttcttgagatcctttttttctgcgcgtaatctgctgcttgcaaacaaaaaaaccaccgctaccagcggtggtttgtttgccggatcaagagctaccaactctttttccgaaggtaactggcttcagcagagcgcagataccaaatactgttcttctagtgtagccgtagttaggccaccacttcaagaactctgtagcaccgcctacatacctcgctctgctaatcctgttaccagtggctgctgccagtggcgataagtcgtgtcttaccgggttggactcaagacgatagttaccggataaggcgcagcggtcgggctgaacggggggttcgtgcacacagcccagcttggagcgaacgacctacaccgaactgagatacctacagcgtgagctatgagaaagcgccacgcttcccgaagggagaaaggcggacaggtatccggtaagcggcagggtcggaacaggagagcgcacgagggagcttccagggggaaacgcctggtatctttatagtcctgtcgggtttcgccacctctgacttgagcgtcgatttttgtgatgctcgtcaggggggcggagcctatggaaaaacgccagcaacgcggcctttttacggttcctggccttttgctggccttttgctcacatgttctttcctgcgttatcccctgattctgtggataaccgtattaccgcctttgagtgagctgataccgctcgccgcagccgaacgaccgagcgcagcgagtcagtgagcgaggaagcggaagagcgcccaatacgcaaaccgcctctccccgcgcgttggccgattcattaatgcagctggcacgacaggtttcccgactggaaagcgggcagtgagcgcaacgcaattaatgtgagttagctcactcattaggcaccccaggctttacactttatgcttccggctcgtatgttgtgtggaattgtgagcggataacaatttcacacaggaaacagctatgaccatgattacaccaagcttgcatgcaggcctatccgtagatgtacctggacatccaggtgatgccggcggcggtggtggaggcgcgcggaaagtcgcggacgcggttccagatgttgcgcagcggcaaaaagtgctccatggtcgggacgctctggccggtgaggcgtgcgcagtcgttgacgctctagaccgtgcaaaaggagagcctgtaagcgggcactcttccgtggtctggtggataaattcgcaagggtatcatggcggacgaccggggttcgaaccccggatccggccgtccgccgtgatccatgcggttaccgcccgcgtgtcgaacccaggtgtgcgacgtcagacaacgggggagcgctccttttggcttccttccaggcgcggcggctgctgcgctagcttttttggccactggccgcgcgcggcgtaagcggttaggctggaaagcgaaagcattaagtggctcgctccctgtagccggagggttattttccaagggttgagtcgcaggacccccggttcgagtctcgggccggccggactgcggcgaacgggggtttgcctccccgtcatgcaagaccccgcttgcaaattcctccggaaacagggacgagccccttttttgcttttcccagatgcatccggtgctgcggcagatgcgcccccctcctcagcagcggcaagagcaagagcagcggcagacatgcagggcaccctccccttctcctaccgcgtcaggaggggcaacatctgtacactctcgggtgattatttacccccacccttgccgtctgcgccgtttaaaaatcaaaggggttctgccgcgcatcgctatgcgccactggcagggacacgttgcgatactggtgtttagtgctccacttaaactcaggcacaaccatccgcggcagctcggtgaagttttcactccacaggctgcgcaccatcaccaacgcgtttagcaggtcgggcgccgatatcttgaagtcgcagttggggcctccgccctgcgcgcgcgagttgcgatacacagggttgcagcactggaacactatcagcgccgggtggtgcacgctggccagcacgctcttgtcggagatcagatccgcgtccaggtcctccgcgttgctcagggcgaacggagtcaactttggtagctgccttcccaaaaagggcgcgtgcccaggctttgagttgcactcgcaccgtagtggcatcaaaaggtgaccgtgcccggtctgggcgttaggatacagcgcctgcataaaagccttgatctgcttaaaagccacctgagcctttgcgccttcagagaagaacatgccgcaagacttgccggaaaactgattggccggacaggccgcgtcgtgcacgcagcaccttgcgtcggtgttggagatctgcaccacatttcggccccaccggttcttcacgatcttggccttgctagactgctccttcagcgcgcgctgcccgttttcgctcgtcacatccatttcaatcacgtgctccttatttatcataatgcttccgtgtagacacttaagctcgccttcgatctcagcgcagcggtgcagccacaacgcgcagcccgtgggctcgtgatgcttgtaggtcacctctgcaaacgactgcaggtacgcctgcaggaatcgccccatcatcgtcacaaaggtcttgttgctggtgaaggtcagctgcaacccgcggtgctcctcgttcagccaggtcttgcatacggccgccagagcttccacttggtcaggcagtagtttgaagttcgcctttagatcgttatccacgtggtacttgtccatcagcgcgcgcgcagcctccatgcccttctcccacgcagacacgatcggcacactcagcgggttcatcaccgtaatttcactttccgcttcgctgggctcttcctcttcctcttgcgtccgcataccacgcgccactgggtcgtcttcattcagccgccgcactgtgcgcttacctcctttgccatgcttgattagcaccggtgggttgctgaaacccaccatttgtagcgccacatcttctctttcttcctcgctgtccacgattacctctggtgatggcgggcgctcgggcttgggagaagggcgcttctttttcttcttgggcgcaatggccaaatccgccgccgaggtcgatggccgcgggctgggtgtgcgcggcaccagcgcgtcttgtgatgagtcttcctcgtcctcggactcgatacgccgcctcatccgcttttttgggggcgcccggggaggcggcggcgacggggacggggacgacacgtcctccatggttgggggacgtcgcgccgcaccgcgtccgcgctcgggggtggtttcgcgctgctcctcttcccgactggccatttccttctcctataggcagaaaaagatccacaaaagcgaagatcagcttcggcgcacgctggaagacgcggaggctctcttcagtaaatactgcgcgctgactcttaaggactagtttcgcgccctttctcaaatttaagcgcgaaaactacgtcatctccagcggccacacccggcgccagcacctgttgtcagcgccattggcgcgccggccggccgaatatcttcatttaaatgtttaaacatcgatgcggccgcaacttgtttattgcagcttataatggttacaaataaagcaatagcatcacaaatttcacaaataaagcatttttttcactgcattctagttgtggtttgtccaaactcatcaatgtatcttagcttaacgggcggcgaaggagaagtccacgcctacatgggggtagagtcataatcgtgcatcaggatagggcggtggtgctgcagcagcgcgcgaataaactgctgccgccgccgctccgtcctgcaggaatacaacatggcagtggtctcctcagcgatgattcgcaccgcccgcagcataaggcgccttgtcctccgggcacagcagcgcaccctgatctcacttaaatcagcacagtaactgcagcacagcaccacaatattgttcaaaatcccacagtgcaaggcgctgtatccaaagctcatggcggggaccacagaacccacgtggccatcataccacaagcgcaggtagattaagtggcgacccctcataaacacgctggacataaacattacctcttttggcatgttgtaattcaccacctcccggtaccatataaacctctgattaaacatggcgccatccaccaccatcctaaaccagctggccaaaacctgcccgccggctatacactgcagggaaccgggactggaacaatgacagtggagagcccaggactcgtaaccatggatcatcatgctcgtcatgatatcaatgttggcacaacacaggcacacgtgcatacacttcctcaggattacaagctcctcccgcgttagaaccatatcccagggaacaacccattcctgaatcagcgtaaatcccacactgcagggaagacctcgcacgtaactcacgttgtgcattgtcaaagtgttacattcgggcagcagcggatgatcctccagtatggtagcgcgggtttctgtctcaaaaggaggtagacgatccctactgtacggagtgcgccgagacaaccgagatcgtgttggtcgtagtgtcatgccaaatggaacgccggacgtagtcatatttcctgaagcaaaaccaggtgcgggcgtgacaaacagatctgcgtctccggtctcgccgcttagatcgctctgtgtagtagttgtagtatatccactctctcaaagcatccaggcgccccctggcttcgggttctatgtaaactccttcatgcgccgctgccctgataacatccaccaccgcagaataagccacacccagccaacctacacattcgttctgcgagtcacacacgggaggagcgggaagagctggaagaaccatgtttttttttttattccaaaagattatccaaaacctcaaaatgaagatctattaagtgaacgcgctcccctccggtggcgtggtcaaactctacagccaaagaacagataatggcatttgtaagatgttgcacaatggcttccaaaaggcaaacggccctcacgtccaagtggacgtaaaggctaaacccttcagggtgaatctcctctataaacattccagcaccttcaaccatgcccaaataattctcatctcgccaccttctcaatatatctctaagcaaatcccgaatattaagtccggccattgtaaaaatctgctccagagcgccctccaccttcagcctcaagcagcgaatcatgattgcaaaaattcaggttcctcacagacctgtataagattcaaaagcggaacattaacaaaaataccgcgatcccgtaggtcccttcgcagggccagctgaacataatcgtgcaggtctgcacggaccagcgcggccacttccccgccaggaaccatgacaaaagaacccacactgattatgacacgcatactcggagctatgctaaccagcgtagccccgatgtaagcttgttgcatgggcggcgatataaaatgcaaggtgctgctcaaaaaatcaggcaaagcctcgcgcaaaaaagaaagcacatcgtagtcatgctcatgcagataaaggcaggtaagctccggaaccaccacagaaaaagacaccatttttctctcaaacatgtctgcgggtttctgcataaacacaaaataaaataacaaaaaaacatttaaacattagaagcctgtcttacaacaggaaaaacaacccttataagcataagacggactacggccatgccggcgtgaccgtaaaaaaactggtcaccgtgattaaaaagcaccaccgacagctcctcggtcatgtccggagtcataatgtaagactcggtaaacacatcaggttgattcacatcggtcagtgctaaaaagcgaccgaaatagcccgggggaatacatacccgcaggcgtagagacaacattacagcccccataggaggtataacaaaattaataggagagaaaaacacataaacacctgaaaaaccctcctgcctaggcaaaatagcaccctcccgctccagaacaacatacagcgcttccacagcggcagccataacagtcagccttaccagtaaaaaagaaaacctattaaaaaaacaccactcgacacggcaccagctcaatcagtcacagtgtaaaaaagggccaagtgcagagcgagtatatataggactaaaaaatgacgtaacggttaaagtccacaaaaaacacccagaaaaccgcacgcgaacctacgcccagaaacgaaagccaaaaaacccacaacttcctcaaatcgtcacttccgttttcccacgttacgtcacttcccattttaagaaaactacaattcccaacacatacaagttactccgcccttaattaaatcggatccgatatctagatgtattcgcgaggtaccgagctcgaattctctggccgtcgttttacaacgtcgtgactgggaaaaccctggcgttacccaacttaatcgccttgcagcacatccccctttcgccagctggcgtaatagcgaagaggcccgcaccgatcgcccttcccaacagttgcgcagcctgaatggcgaatggcgcctgatgcggtattttctccttacgcatctgtgcggtatttcacaccgcatatggtgcactctcagtacaatctgctctgatgccgcatagttaagccagccccgacacccgccaacacccgctgacgcgccctgacgggcttgtctgctcccggcatccgcttacagacaagctgtgaccgtctccgggagctgcatgtgtcagaggttttcaccgtcatcaccgaaacgcgcga

SEQ ID NO: 47 - DNA, 8985 bp, Artificial Sequence
  Description of Artificial Sequence: Synthetic polynucleotide
tgcagctctggcccgtgtctcaaaatctctgatgttacattgcacaagataaaaatatatcatcatgaacaataaaactgtctgcttacataaacagtaatacaaggggtgttatgagccatattcaacgggaaacgtcgaggccgcgattaaattccaacatggatgctgatttatatgggtataaatgggctcgcgataatgtcgggcaatcaggtgcgacaatctatcgcttgtatgggaagcccgatgcgccagagttgtttctgaaacatggcaaaggtagcgttgccaatgatgttacagatgagatggtcagactaaactggctgacggaatttatgcctcttccgaccatcaagcattttatccgtactcctgatgatgcatggttactcaccactgcgatccccggaaaaacagcattccaggtattagaagaatatcctgattcaggtgaaaatattgttgatgcgctggcagtgttcctgcgccggttgcattcgattcctgtttgtaattgtccttttaacagcgatcgcgtatttcgtctcgctcaggcgcaatcacgaatgaataacggtttggttgatgcgagtgattttgatgacgagcgtaatggctggcctgttgaacaagtctggaaagaaatgcataaacttttgccattctcaccggattcagtcgtcactcatggtgatttctcacttgataaccttatttttgacgaggggaaattaataggttgtattgatgttggacgagtcggaatcgcagaccgataccaggatcttgccatcctatggaactgcctcggtgagttttctccttcattacagaaacggctttttcaaaaatatggtattgataatcctgatatgaataaattgcagtttcatttgatgctcgatgagtttttctaatcagaattggttaattggttgtaacattattcagattgggcttgatttaaaacttcatttttaatttaaaaggatctaggtgaagatcctttttgataatctcatgaccaaaatcccttaacgtgagttttcgttccactgagcgtcagaccccgtagaaaagatcaaaggatcttcttgagatcctttttttctgcgcgtaatctgctgcttgcaaacaaaaaaaccaccgctaccagcggtggtttgtttgccggatcaagagctaccaactctttttccgaaggtaactggcttcagcagagcgcagataccaaatactgttcttctagtgtagccgtagttaggccaccacttcaagaactctgtagcaccgcctacatacctcgctctgctaatcctgttaccagtggctgctgccagtggcgataagtcgtgtcttaccgggttggactcaagacgatagttaccggataaggcgcagcggtcgggctgaacggggggttcgtgcacacagcccagcttggagcgaacgacctacaccgaactgagatacctacagcgtgagctatgagaaagcgccacgcttcccgaagggagaaaggcggacaggtatccggtaagcggcagggtcggaacaggagagcgcacgagggagcttccagggggaaacgcctggtatctttatagtcctgtcgggtttcgccacctctgacttgagcgtcgatttttgtgatgctcgtcaggggggcggagcctatggaaaaacgccagcaacgcggcctttttacggttcctggccttttgctggccttttgctcacatgttctttcctgcgttatcccctgattctgtggataaccgtattaccgcctttgagtgagctgataccgctcgccgcagccgaacgaccgagcgcagcgagtcagtgagcgaggaagcggaagagcgcccaatacgcaaaccgcctctccccgcgcgttggccgattcattaatgcagctggcacgacaggtttcccgactggaaagcgggcagtgagcgcaacgcaattaatgtgagttagctcactcattaggcaccccaggctttacactttatgcttccggctcgtatgttgtgtggaattgtgagcggataacaatttcacacaggaaacagctatgaccatgattacaccaagcttgcatgcaggcctctgcagtcgaccagaagcaccatgtccttgggtccggcctgctgaatgcgcaggcggtcggccatgccccaggcttcgttttgacatcggcgcaggtctttgtagtagtcttgcatgagcctttctaccggcacttcttcttctccttcctcttgtcctgcatctcttgcatctatcgctgcggcggcggcggagtttggccgtaggtggcgccctcttcctcccatgcgtgtgaccccgaagcccctcatcggctgaagcagggctaggtcggcgacaacgcgctcggctaatatggcctgctgcacctgcgtgagggtagactggaagtcatccatgtccacaaagcggtggtatgcgcccgtgttgatggtgtaagtgcagttggccataacggaccagttaacggtctggtgacccggctgcgagagctcggtgtacctgagacgcgagtaagccctcgagtcaaatacgtagtcgttgcaagtccgcaccaggtactggtatcccaccaaaaagtgcggcggcggctggcggtagaggggccagcgtagggtggccggggctccgggggcgagatcttccaacataaggcgatgatatccgtagatgtacctggacatccaggtgatgccggcggcggtggtggaggcgcgcggaaagtcgcggacgcggttccagatgttgcgcagcggcaaaaagtgctccatggtcgggacgctctggccggtcaggcgcgcgcaatcgttgacgctctagcgtgcaaaaggagagcctgtaagcgggcactcttccgtggtctggtggataaattcgcaagggtatcatggcggacgaccggggttcgagccccgtatccggccgtccgccgtgatccatgcggttaccgcccgcgtgtcgaacccaggtgtgcgacgtcagacaacgggggagtgctccttttggcttccttccaggcgcggcggctgctgcgctagcttttttggccactggccgcgcgcagcgtaagcggttaggctggaaagcgaaagcattaagtggctcgctccctgtagccggagggttattttccaagggttgagtcgcgggacccccggttcgagtctcggaccgagactgggggcgtacactggatggcctttgcctggaacccgcactcaaaaacatgctacctctttgagccctttggcttttctgaccagcgactcaagcaggtttaccagtttgagtacgagtcactcctgcgccgtagcgccattgcttcttcccccgaccgctgtataacgctggaaaagtccacccaaagcgtacaggggcccaactcggccgcctgtggactattctgctgcatgtttctccacgcctttgccaactggccccaaactcccatggatcacaaccccaccatgaaccttattaccggggtacccaactccatgctcaacagtccccaggtacagcccaccctgcgtcgcaaccaggaacagctctacagcttcctggagcgccactcgccctacttccgcagccacagtgcgcagattaggagcgccacttctttttgtcacttgaaaaacatgtaaaaataatgtactagagacactttcaataaaggcaaatgcttttatttgtacactctcgggtgattatttacccccacccttgccgtctgcgccgtttaaaaatcaaaggggttctgccgcgcatcgctatgcgccactggcagggacacgttgcgatactggtgtttagtgctccacttaaactcaggcacaaccatccgcggcagctcggtgaagttttcactccacaggctgcgcaccatcaccaacgcgtttagcaggtcgggcgccgatatcttgaagtcgcagttggggcctccgccctgcgcgcgcgagttgcgatacacagggttgcagcactggaacactatcagcgccgggtggtgcacgctggccagcacgctcttgtcggagatcagatccgcgtccaggtcctccgcgttgctcagggcgaacggagtcaactttggtagctgccttcccaaaaagggcgcgtgcccaggctttgagttgcactcgcaccgtagtggcatcaaaaggtgaccgtgcccggtctgggcgttaggatacagcgcctgcataaaagccttgatctgcttaaaagccacctgagcctttgcgccttcagagaagaacatgccgcaagacttgccggaaaactgattggccggacaggccgcgtcgtgcacgcagcaccttgcgtcggtgttggagatctgcaccacatttcggccccaccggttcttcacgatcttggccttgctagactgctccttcagcgcgcgctgcccgttttcgctcgtcacatccatttcaatcacgtgctccttatttatcataatgcttccgtgtagacacttaagctcgccttcgatctcagcgcagcggtgcagccacaacgcgcagcccgtgggctcgtgatgcttgtaggtcacctctgcaaacgactgcaggtacgcctgcaggaatcgccccatcatcgtcacaaaggtcttgttgctggtgaaggtcagctgcaacccgcggtgctcctcgttcagccaggtcttgcatacggccgccagagcttccacttggtcaggcagtagtttgaagttcgcctttagatcgttatccacgtggtacttgtccatcagcgcgcgcgcagcctccatgcccttctcccacgcagacacgatcggcacactcagcgggttcatcaccgtaatttcactttccgcttcgctgggctcttcctcttcctcttgcgtccgcataccacgcgccactgggtcgtcttcattcagccgccgcactgtgcgcttacctcctttgccatgcttgattagcaccggtgggttgctgaaacccaccatttgtagcgccacatcttctctttcttcctcgctgtccacgattacctctggtgatggcgggcgctcgggcttgggagaagggcgcttctttttcttcttgggcgcaatggccaaatccgccgccgaggtcgatggccgcgggctgggtgtgcgcggcaccagcgcgtcttgtgatgagtcttcctcgtcctcggactcgatacgccgcctcatccgcttttttgggggcgcccggggaggcggcggcgacggggacggggacgacacgtcctccatggttgggggacgtcgcgccgcaccgcgtccgcgctcgggggtggtttcgcgctgctcctcttcccgactggccatttccttctcctataggcagaaaaagatccacaaaagcgaagatcagcttcggcgcacgctggaagacgcggaggctctcttcagtaaatactgcgcgctgactcttaaggactagtttcgcgccctttctcaaatttaagcgcgaaaactacgtcatctccagcggccacacccggcgccagcacctgttgtcagcgccattggcgcgccggccggccgaatatcttcatttaaatgtttaaacatcgatgcggccgcaacttgtttattgcagcttataatggttacaaataaagcaatagcatcacaaatttcacaaataaagcatttttttcactgcattctagttgtggtttgtccaaactcatcaatgtatcttagcttaacgggcggcgaaggagaagtccacgcctacatgggggtagagtcataatcgtgcatcaggatagggcggtggtgctgcagcagcgcgcgaataaactgctgccgccgccgctccgtcctgcaggaatacaacatggcagtggtctcctcagcgatgattcgcaccgcccgcagcataaggcgccttgtcctccgggcacagcagcgcaccctgatctcacttaaatcagcacagtaactgcagcacagcaccacaatattgttcaaaatcccacagtgcaaggcgctgtatccaaagctcatggcggggaccacagaacccacgtggccatcataccacaagcgcaggtagattaagtggcgacccctcataaacacgctggacataaacattacctcttttggcatgttgtaattcaccacctcccggtaccatataaacctctgattaaacatggcgccatccaccaccatcctaaaccagctggccaaaacctgcccgccggctatacactgcagggaaccgggactggaacaatgacagtggagagcccaggactcgtaaccatggatcatcatgctcgtcatgatatcaatgttggcacaacacaggcacacgtgcatacacttcctcaggattacaagctcctcccgcgttagaaccatatcccagggaacaacccattcctgaatcagcgtaaatcccacactgcagggaagacctcgcacgtaactcacgttgtgcattgtcaaagtgttacattcgggcagcagcggatgatcctccagtatggtagcgcgggtttctgtctcaaaaggaggtagacgatccctactgtacggagtgcgccgagacaaccgagatcgtgttggtcgtagtgtcatgccaaatggaacgccggacgtagtcatatttcctgaagcaaaaccaggtgcgggcgtgacaaacagatctgcgtctccggtctcgccgcttagatcgctctgtgtagtagttgtagtatatccactctctcaaagcatccaggcgccccctggcttcgggttctatgtaaactccttcatgcgccgctgccctgataacatccaccaccgcagaataagccacacccagccaacctacacattcgttctgcgagtcacacacgggaggagcgggaagagctggaagaaccatgtttttttttttattccaaaagattatccaaaacctcaaaatgaagatctattaagtgaacgcgctcccctccggtggcgtggtcaaactctacagccaaagaacagataatggcatttgtaagatgttgcacaatggcttccaaaaggcaaacggccctcacgtccaagtggacgtaaaggctaaacccttcagggtgaatctcctctataaacattccagcaccttcaaccatgcccaaataattctcatctcgccaccttctcaatatatctctaagcaaatcccgaatattaagtccggccattgtaaaaatctgctccagagcgccctccaccttcagcctcaagcagcgaatcatgattgcaaaaattcaggttcctcacagacctgtataagattcaaaagcggaacattaacaaaaataccgcgatcccgtaggtcccttcgcagggccagctgaacataatcgtgcaggtctgcacggaccagcgcggccacttccccgccaggaaccatgacaaaagaacccacactgattatgacacgcatactcggagctatgctaaccagcgtagccccgatgtaagcttgttgcatgggcggcgatataaaatgcaaggtgctgctcaaaaaatcaggcaaagcctcgcgcaaaaaagaaagcacatcgtagtcatgctcatgcagataaaggcaggtaagctccggaaccaccacagaaaaagacaccatttttctctcaaacatgtctgcgggtttctgcataaacacaaaataaaataacaaaaaaacatttaaacattagaagcctgtcttacaacaggaaaaacaacccttataagcataagacggactacggccatgccggcgtgaccgtaaaaaaactggtcaccgtgattaaaaagcaccaccgacagctcctcggtcatgtccggagtcataatgtaagactcggtaaacacatcaggttgattcacatcggtcagtgctaaaaagcgaccgaaatagcccgggggaatacatacccgcaggcgtagagacaacattacagcccccataggaggtataacaaaattaataggagagaaaaacacataaacacctgaaaaaccctcctgcctaggcaaaatagcaccctcccgctccagaacaacatacagcgcttccacagcggcagccatggtggcatttgcaaaagcctaggcctccaaaaaagcctcctcactacttctggaatagctcagaggccgaggcggcctcggcctctgcataaataaaaaaaattagtcagccatggggcggagaatgggcggaactgggcggagttaggggcgggatgggcggagttaggggcgggactatggttgctgactaattgagatgcatgctttgcatacttctgcctgctggggagcctggggactttccacacctggttgctgactaattgagatgcatgctttgcatacttctgcctgctggggagcctggggactttccacaccctaactgacacacacgttacgtcacttcccattttaagaaaactacaattcccaacacatacaagttactccgcccttaattaaatcggatccgatatctagatgtattcgcgaggtaccgagctcgaattctctggccgtcgttttacaacgtcgtgactgggaaaaccctggcgttacccaacttaatcgccttgcagcacatccccctttcgccagctggcgtaatagcgaagaggcccgcaccgatcgcccttcccaacagttgcgcagcctgaatggcgaatggcgcctgatgcggtattttctccttacgcatctgtgcggtatttcacaccgcatatggtgcactctcagtacaatctgctctgatgccgcatagttaagccagccccgacacccgccaacacccgctgacgcgccctgacgggcttgtctgctcccggcatccgcttacagacaagctgtgaccgtctccgggagctgcatgtgtcagaggttttcaccgtcatcaccgaaacgcgcga

SEQ ID NO: 48 - DNA, 8086 bp, Artificial Sequence
  Description of Artificial Sequence: Synthetic polynucleotide
tgcagctctggcccgtgtctcaaaatctctgatgttacattgcacaagataaaaatatatcatcatgaacaataaaactgtctgcttacataaacagtaatacaaggggtgttatgagccatattcaacgggaaacgtcgaggccgcgattaaattccaacatggatgctgatttatatgggtataaatgggctcgcgataatgtcgggcaatcaggtgcgacaatctatcgcttgtatgggaagcccgatgcgccagagttgtttctgaaacatggcaaaggtagcgttgccaatgatgttacagatgagatggtcagactaaactggctgacggaatttatgcctcttccgaccatcaagcattttatccgtactcctgatgatgcatggttactcaccactgcgatccccggaaaaacagcattccaggtattagaagaatatcctgattcaggtgaaaatattgttgatgcgctggcagtgttcctgcgccggttgcattcgattcctgtttgtaattgtccttttaacagcgatcgcgtatttcgtctcgctcaggcgcaatcacgaatgaataacggtttggttgatgcgagtgattttgatgacgagcgtaatggctggcctgttgaacaagtctggaaagaaatgcataaacttttgccattctcaccggattcagtcgtcactcatggtgatttctcacttgataaccttatttttgacgaggggaaattaataggttgtattgatgttggacgagtcggaatcgcagaccgataccaggatcttgccatcctatggaactgcctcggtgagttttctccttcattacagaaacggctttttcaaaaatatggtattgataatcctgatatgaataaattgcagtttcatttgatgctcgatgagtttttctaatcagaattggttaattggttgtaacattattcagattgggcttgatttaaaacttcatttttaatttaaaaggatctaggtgaagatcctttttgataatctcatgaccaaaatcccttaacgtgagttttcgttccactgagcgtcagaccccgtagaaaagatcaaaggatcttcttgagatcctttttttctgcgcgtaatctgctgcttgcaaacaaaaaaaccaccgctaccagcggtggtttgtttgccggatcaagagctaccaactctttttccgaaggtaactggcttcagcagagcgcagataccaaatactgttcttctagtgtagccgtagttaggccaccacttcaagaactctgtagcaccgcctacatacctcgctctgctaatcctgttaccagtggctgctgccagtggcgataagtcgtgtcttaccgggttggactcaagacgatagttaccggataaggcgcagcggtcgggctgaacggggggttcgtgcacacagcccagcttggagcgaacgacctacaccgaactgagatacctacagcgtgagctatgagaaagcgccacgcttcccgaagggagaaaggcggacaggtatccggtaagcggcagggtcggaacaggagagcgcacgagggagcttccagggggaaacgcctggtatctttatagtcctgtcgggtttcgccacctctgacttgagcgtcgatttttgtgatgctcgtcaggggggcggagcctatggaaaaacgccagcaacgcggcctttttacggttcctggccttttgctggccttttgctcacatgttctttcctgcgttatcccctgattctgtggataaccgtattaccgcctttgagtgagctgataccgctcgccgcagccgaacgaccgagcgcagcgagtcagtgagcgaggaagcggaagagcgcccaatacgcaaaccgcctctccccgcgcgttggccgattcattaatgcagctggcacgacaggtttcccgactggaaagcgggcagtgagcgcaacgcaattaatgtgagttagctcactcattaggcaccccaggctttacactttatgcttccggctcgtatgttgtgtggaattgtgagcggataacaatttcacacaggaaacagctatgaccatgattacaccaagcttgcatgcaggcctatccgtagatgtacctggacatccaggtgatgccggcggcggtggtggaggcgcgcggaaagtcgcggacgcggttccagatgttgcgcagcggcaaaaagtgctccatggtcgggacgctctggccggtgaggcgtgcgcagtcgttgacgctctagaccgtgcaaaaggagagcctgtaagcgggcactcttccgtggtctggtggataaattcgcaagggtatcatggcggacgaccggggttcgaaccccggatccggccgtccgccgtgatccatgcggttaccgcccgcgtgtcgaacccaggtgtgcgacgtcagacaacgggggagcgctccttttggcttccttccaggcgcggcggctgctgcgctagcttttttggccactggccgcgcgcggcgtaagcggttaggctggaaagcgaaagcattaagtggctcgctccctgtagccggagggttattttccaagggttgagtcgcaggacccccggttcgagtctcgggccggccggactgcggcgaacgggggtttgcctccccgtcatgcaagaccccgcttgcaaattcctccggaaacagggacgagccccttttttgcttttcccagatgcatccggtgctgcggcagatgcgcccccctcctcagcagcggcaagagcaagagcagcggcagacatgcagggcaccctccccttctcctaccgcgtcaggaggggcaacatctgtacactctcgggtgattatttacccccacccttgccgtctgcgccgtttaaaaatcaaaggggttctgccgcgcatcgctatgcgccactggcagggacacgttgcgatactggtgtttagtgctccacttaaactcaggcacaaccatccgcggcagctcggtgaagttttcactccacaggctgcgcaccatcaccaacgcgtttagcaggtcgggcgccgatatcttgaagtcgcagttggggcctccgccctgcgcgcgcgagttgcgatacacagggttgcagcactggaacactatcagcgccgggtggtgcacgctggccagcacgctcttgtcggagatcagatccgcgtccaggtcctccgcgttgctcagggcgaacggagtcaactttggtagctgccttcccaaaaagggcgcgtgcccaggctttgagttgcactcgcaccgtagtggcatcaaaaggtgaccgtgcccggtctgggcgttaggatacagcgcctgcataaaagccttgatctgcttaaaagccacctgagcctttgcgccttcagagaagaacatgccgcaagacttgccggaaaactgattggccggacaggccgcgtcgtgcacgcagcaccttgcgtcggtgttggagatctgcaccacatttcggccccaccggttcttcacgatcttggccttgctagactgctccttcagcgcgcgctgcccgttttcgctcgtcacatccatttcaatcacgtgctccttatttatcataatgcttccgtgtagacacttaagctcgccttcgatctcagcgcagcggtgcagccacaacgcgcagcccgtgggctcgtgatgcttgtaggtcacctctgcaaacgactgcaggtacgcctgcaggaatcgccccatcatcgtcacaaaggtcttgttgctggtgaaggtcagctgcaacccgcggtgctcctcgttcagccaggtcttgcatacggccgccagagcttccacttggtcaggcagtagtttgaagttcgcctttagatcgttatccacgtggtacttgtccatcagcgcgcgcgcagcctccatgcccttctcccacgcagacacgatcggcacactcagcgggttcatcaccgtaatttcactttccgcttcgctgggctcttcctcttcctcttgcgtccgcataccacgcgccactgggtcgtcttcattcagccgccgcactgtgcgcttacctcctttgccatgcttgattagcaccggtgggttgctgaaacccaccatttgtagcgccacatcttctctttcttcctcgctgtccacgattacctctggtgatggcgggcgctcgggcttgggagaagggcgcttctttttcttcttgggcgcaatggccaaatccgccgccgaggtcgatggccgcgggctgggtgtgcgcggcaccagcgcgtcttgtgatgagtcttcctcgtcctcggactcgatacgccgcctcatccgcttttttgggggcgcccggggaggcggcggcgacggggacggggacgacacgtcctccatggttgggggacgtcgcgccgcaccgcgtccgcgctcgggggtggtttcgcgctgctcctcttcccgactggccatttccttctcctataggcagaaaaagatccacaaaagcgaagatcagcttcggcgcacgctggaagacgcggaggctctcttcagtaaatactgcgcgctgactcttaaggactagtttcgcgccctttctcaaatttaagcgcgaaaactacgtcatctccagcggccacacccggcgccagcacctgttgtcagcgccattggcgcgccggccggccgaatatcttcatttaaatgtttaaacatcgatgcggccgcaacttgtttattgcagcttataatggttacaaataaagcaatagcatcacaaatttcacaaataaagcatttttttcactgcattctagttgtggtttgtccaaactcatcaatgtatcttagcttaacgggcggcgaaggagaagtccacgcctacatgggggtagagtcataatcgtgcatcaggatagggcggtggtgctgcagcagcgcgcgaataaactgctgccgccgccgctccgtcctgcaggaatacaacatggcagtggtctcctcagcgatgattcgcaccgcccgcagcataaggcgccttgtcctccgggcacagcagcgcaccctgatctcacttaaatcagcacagtaactgcagcacagcaccacaatattgttcaaaatcccacagtgcaaggcgctgtatccaaagctcatggcggggaccacagaacccacgtggccatcataccacaagcgcaggtagattaagtggcgacccctcataaacacgctggacataaacattacctcttttggcatgttgtaattcaccacctcccggtaccatataaacctctgattaaacatggcgccatccaccaccatcctaaaccagctggccaaaacctgcccgccggctatacactgcagggaaccgggactggaacaatgacagtggagagcccaggactcgtaaccatggatcatcatgctcgtcatgatatcaatgttggcacaacacaggcacacgtgcatacacttcctcaggattacaagctcctcccgcgttagaaccatatcccagggaacaacccattcctgaatcagcgtaaatcccacactgcagggaagacctcgcacgtaactcacgttgtgcattgtcaaagtgttacattcgggcagcagcggatgatcctccagtatggtagcgcgggtttctgtctcaaaaggaggtagacgatccctactgtacggagtgcgccgagacaaccgagatcgtgttggtcgtagtgtcatgccaaatggaacgccggacgtagtcatatttcctgaagcaaaaccaggtgcgggcgtgacaaacagatctgcgtctccggtctcgccgcttagatcgctctgtgtagtagttgtagtatatccactctctcaaagcatccaggcgccccctggcttcgggttctatgtaaactccttcatgcgccgctgccctgataacatccaccaccgcagaataagccacacccagccaacctacacattcgttctgcgagtcacacacgggaggagcgggaagagctggaagaaccatgtttttttttttattccaaaagattatccaaaacctcaaaatgaagatctattaagtgaacgcgctcccctccggtggcgtggtcaaactctacagccaaagaacagataatggcatttgtaagatgttgcacaatggcttccaaaaggcaaacggccctcacgtccaagtggacgtaaaggctaaacccttcagggtgaatctcctctataaacattccagcaccttcaaccatgcccaaataattctcatctcgccaccttctcaatatatctctaagcaaatcccgaatattaagtccggccattgtaaaaatctgctccagagcgccctccaccttcagcctcaagcagcgaatcatgattgcaaaaattcaggttcctcacagacctgtataagattcaaaagcggaacattaacaaaaataccgcgatcccgtaggtcccttcgcagggccagctgaacataatcgtgcaggtctgcacggaccagcgcggccacttccccgccaggaaccatgacaaaagaacccacactgattatgacacgcatactcggagctatgctaaccagcgtagccccgatgtaagcttgttgcatgggcggcgatataaaatgcaaggtgctgctcaaaaaatcaggcaaagcctcgcgcaaaaaagaaagcacatcgtagtcatgctcatgcagataaaggcaggtaagctccggaaccaccacagaaaaagacaccatttttctctcaaacatgtctgcgggtttctgcataaacacaaaataaaataacaaaaaaacatttaaacattagaagcctgtcttacaacaggaaaaacaacccttataagcataagacggactacggccatgccggcgtgaccgtaaaaaaactggtcaccgtgattaaaaagcaccaccgacagctcctcggtcatgtccggagtcataatgtaagactcggtaaacacatcaggttgattcacatcggtcagtgctaaaaagcgaccgaaatagcccgggggaatacatacccgcaggcgtagagacaacattacagcccccataggaggtataacaaaattaataggagagaaaaacacataaacacctgaaaaaccctcctgcctaggcaaaatagcaccctcccgctccagaacaacatacagcgcttccacagcggcagccatggtggcatttgcaaaagcctaggcctccaaaaaagcctcctcactacttctggaatagctcagaggccgaggcggcctcggcctctgcataaataaaaaaaattagtcagccatggggcggagaatgggcggaactgggcggagttaggggcgggatgggcggagttaggggcgggactatggttgctgactaattgagatgcatgctttgcatacttctgcctgctggggagcctggggactttccacacctggttgctgactaattgagatgcatgctttgcatacttctgcctgctggggagcctggggactttccacaccctaactgacacacacgttacgtcacttcccattttaagaaaactacaattcccaacacatacaagttactccgcccttaattaaatcggatccgatatctagatgtattcgcgaggtaccgagctcgaattctctggccgtcgttttacaacgtcgtgactgggaaaaccctggcgttacccaacttaatcgccttgcagcacatccccctttcgccagctggcgtaatagcgaagaggcccgcaccgatcgcccttcccaacagttgcgcagcctgaatggcgaatggcgcctgatgcggtattttctccttacgcatctgtgcggtatttcacaccgcatatggtgcactctcagtacaatctgctctgatgccgcatagttaagccagccccgacacccgccaacacccgctgacgcgccctgacgggcttgtctgctcccggcatccgcttacagacaagctgtgaccgtctccgggagctgcatgtgtcagaggttttcaccgtcatcaccgaaacgcgcga

SEQ ID NO: 49 - DNA, 9413 bp, Artificial Sequence
  Description of Artificial Sequence: Synthetic polynucleotide
tgcagctctggcccgtgtctcaaaatctctgatgttacattgcacaagataaaaatatatcatcatgaacaataaaactgtctgcttacataaacagtaatacaaggggtgttatgagccatattcaacgggaaacgtcgaggccgcgattaaattccaacatggatgctgatttatatgggtataaatgggctcgcgataatgtcgggcaatcaggtgcgacaatctatcgcttgtatgggaagcccgatgcgccagagttgtttctgaaacatggcaaaggtagcgttgccaatgatgttacagatgagatggtcagactaaactggctgacggaatttatgcctcttccgaccatcaagcattttatccgtactcctgatgatgcatggttactcaccactgcgatccccggaaaaacagcattccaggtattagaagaatatcctgattcaggtgaaaatattgttgatgcgctggcagtgttcctgcgccggttgcattcgattcctgtttgtaattgtccttttaacagcgatcgcgtatttcgtctcgctcaggcgcaatcacgaatgaataacggtttggttgatgcgagtgattttgatgacgagcgtaatggctggcctgttgaacaagtctggaaagaaatgcataaacttttgccattctcaccggattcagtcgtcactcatggtgatttctcacttgataaccttatttttgacgaggggaaattaataggttgtattgatgttggacgagtcggaatcgcagaccgataccaggatcttgccatcctatggaactgcctcggtgagttttctccttcattacagaaacggctttttcaaaaatatggtattgataatcctgatatgaataaattgcagtttcatttgatgctcgatgagtttttctaatcagaattggttaattggttgtaacattattcagattgggcttgatttaaaacttcatttttaatttaaaaggatctaggtgaagatcctttttgataatctcatgaccaaaatcccttaacgtgagttttcgttccactgagcgtcagaccccgtagaaaagatcaaaggatcttcttgagatcctttttttctgcgcgtaatctgctgcttgcaaacaaaaaaaccaccgctaccagcggtggtttgtttgccggatcaagagctaccaactctttttccgaaggtaactggcttcagcagagcgcagataccaaatactgttcttctagtgtagccgtagttaggccaccacttcaagaactctgtagcaccgcctacatacctcgctctgctaatcctgttaccagtggctgctgccagtggcgataagtcgtgtcttaccgggttggactcaagacgatagttaccggataaggcgcagcggtcgggctgaacggggggttcgtgcacacagcccagcttggagcgaacgacctacaccgaactgagatacctacagcgtgagctatgagaaagcgccacgcttcccgaagggagaaaggcggacaggtatccggtaagcggcagggtcggaacaggagagcgcacgagggagcttccagggggaaacgcctggtatctttatagtcctgtcgggtttcgccacctctgacttgagcgtcgatttttgtgatgctcgtcaggggggcggagcctatggaaaaacgccagcaacgcggcctttttacggttcctggccttttgctggccttttgctcacatgttctttcctgcgttatcccctgattctgtggataaccgtattaccgcctttgagtgagctgataccgctcgccgcagccgaacgaccgagcgcagcgagtcagtgagcgaggaagcggaagagcgcccaatacgcaaaccgcctctccccgcgcgttggccgattcattaatgcagctggcacgacaggtttcccgactggaaagcgggcagtgagcgcaacgcaattaatgtgagttagctcactcattaggcaccccaggctttacactttatgcttccggctcgtatgttgtgtggaattgtgagcggataacaatttcacacaggaaacagctatgaccatgattacaccaagcttgcatgcaggcctctgcagtcgaccagaagcaccatgtccttgggtccggcctgctgaatgcgcaggcggtcggccatgccccaggcttcgttttgacatcggcgcaggtctttgtagtagtcttgcatgagcctttctaccggcacttcttcttctccttcctcttgtcctgcatctcttgcatctatcgctgcggcggcggcggagtttggccgtaggtggcgccctcttcctcccatgcgtgtgaccccgaagcccctcatcggctgaagcagggctaggtcggcgacaacgcgctcggctaatatggcctgctgcacctgcgtgagggtagactggaagtcatccatgtccacaaagcggtggtatgcgcccgtgttgatggtgtaagtgcagttggccataacggaccagttaacggtctggtgacccggctgcgagagctcggtgtacctgagacgcgagtaagccctcgagtcaaatacgtagtcgttgcaagtccgcaccaggtactggtatcccaccaaaaagtgcggcggcggctggcggtagaggggccagcgtagggtggccggggctccgggggcgagatcttccaacataaggcgatgatatccgtagatgtacctggacatccaggtgatgccggcggcggtggtggaggcgcgcggaaagtcgcggacgcggttccagatgttgcgcagcggcaaaaagtgctccatggtcgggacgctctggccggtcaggcgcgcgcaatcgttgacgctctagcgtgcaaaaggagagcctgtaagcgggcactcttccgtggtctggtggataaattcgcaagggtatcatggcggacgaccggggttcgagccccgtatccggccgtccgccgtgatccatgcggttaccgcccgcgtgtcgaacccaggtgtgcgacgtcagacaacgggggagtgctccttttggcttccttccaggcgcggcggctgctgcgctagcttttttggccactggccgcgcgcagcgtaagcggttaggctggaaagcgaaagcattaagtggctcgctccctgtagccggagggttattttccaagggttgagtcgcgggacccccggttcgagtctcggaccgagactgggggcgtacactggatggcctttgcctggaacccgcactcaaaaacatgctacctctttgagccctttggcttttctgaccagcgactcaagcaggtttaccagtttgagtacgagtcactcctgcgccgtagcgccattgcttcttcccccgaccgctgtataacgctggaaaagtccacccaaagcgtacaggggcccaactcggccgcctgtggactattctgctgcatgtttctccacgcctttgccaactggccccaaactcccatggatcacaaccccaccatgaaccttattaccggggtacccaactccatgctcaacagtccccaggtacagcccaccctgcgtcgcaaccaggaacagctctacagcttcctggagcgccactcgccctacttccgcagccacagtgcgcagattaggagcgccacttctttttgtcacttgaaaaacatgtaaaaataatgtactagagacactttcaataaaggcaaatgcttttatttgtacactctcgggtgattatttacccccacccttgccgtctgcgccgtttaaaaatcaaaggggttctgccgcgcatcgctatgcgccactggcagggacacgttgcgatactggtgtttagtgctccacttaaactcaggcacaaccatccgcggcagctcggtgaagttttcactccacaggctgcgcaccatcaccaacgcgtttagcaggtcgggcgccgatatcttgaagtcgcagttggggcctccgccctgcgcgcgcgagttgcgatacacagggttgcagcactggaacactatcagcgccgggtggtgcacgctggccagcacgctcttgtcggagatcagatccgcgtccaggtcctccgcgttgctcagggcgaacggagtcaactttggtagctgccttcccaaaaagggcgcgtgcccaggctttgagttgcactcgcaccgtagtggcatcaaaaggtgaccgtgcccggtctgggcgttaggatacagcgcctgcataaaagccttgatctgcttaaaagccacctgagcctttgcgccttcagagaagaacatgccgcaagacttgccggaaaactgattggccggacaggccgcgtcgtgcacgcagcaccttgcgtcggtgttggagatctgcaccacatttcggccccaccggttcttcacgatcttggccttgctagactgctccttcagcgcgcgctgcccgttttcgctcgtcacatccatttcaatcacgtgctccttatttatcataatgcttccgtgtagacacttaagctcgccttcgatctcagcgcagcggtgcagccacaacgcgcagcccgtgggctcgtgatgcttgtaggtcacctctgcaaacgactgcaggtacgcctgcaggaatcgccccatcatcgtcacaaaggtcttgttgctggtgaaggtcagctgcaacccgcggtgctcctcgttcagccaggtcttgcatacggccgccagagcttccacttggtcaggcagtagtttgaagttcgcctttagatcgttatccacgtggtacttgtccatcagcgcgcgcgcagcctccatgcccttctcccacgcagacacgatcggcacactcagcgggttcatcaccgtaatttcactttccgcttcgctgggctcttcctcttcctcttgcgtccgcataccacgcgccactgggtcgtcttcattcagccgccgcactgtgcgcttacctcctttgccatgcttgattagcaccggtgggttgctgaaacccaccatttgtagcgccacatcttctctttcttcctcgctgtccacgattacctctggtgatggcgggcgctcgggcttgggagaagggcgcttctttttcttcttgggcgcaatggccaaatccgccgccgaggtcgatggccgcgggctgggtgtgcgcggcaccagcgcgtcttgtgatgagtcttcctcgtcctcggactcgatacgccgcctcatccgcttttttgggggcgcccggggaggcggcggcgacggggacggggacgacacgtcctccatggttgggggacgtcgcgccgcaccgcgtccgcgctcgggggtggtttcgcgctgctcctcttcccgactggccatttccttctcctataggcagaaaaagatccacaaaagcgaagatcagcttcggcgcacgctggaagacgcggaggctctcttcagtaaatactgcgcgctgactcttaaggactagtttcgcgccctttctcaaatttaagcgcgaaaactacgtcatctccagcggccacacccggcgccagcacctgttgtcagcgccattggcgcgcccgcccgccgcgcgcttcgctttttatagggccgccgccgccgccgcctcgccataaaaggaaactttcggagcgcgccgctctgattggctgccgccgcacctctccgcctcgccccgccccgcccctcgccccgccccgccccgcctggcgcgcgccccccccccccccccgcccccatcgctgcacaaaataattaaaaaataaataaatacaaaattgggggtggggaggggggggagatggggagagtgaagcagaacgtggggctcacctcgaggccggccgaatatcttcatttaaatgtttaaacatcgatgcggccgccgtttgtgttatgtttcaacgtgtttatttttcaattgcagaaaatttcaagtcatttttcattcagtagtatagccccaccaccacatagcttatacagatcaccgtaccttaatcaaactcacagaaccctagtattcaacctgccacctccctcccaacacacagagtacacagtcctttctccccggctggccttaaaaagcatcatatcatgggtaacagacatattcttaggtgttatattccacacggtttcctgtcgagccaaacgctcatcagtgatattaataaactccccgggcagctcacttaagttcatgtcgctgtccagctgctgagccacaggctgctgtccaacttgcggttgcttaacgggcggcgaaggagaagtccacgcctacatgggggtagagtcataatcgtgcatcaggatagggcggtggtgctgcagcagcgcgcgaataaactgctgccgccgccgctccgtcctgcaggaatacaacatggcagtggtctcctcagcgatgattcgcaccgcccgcagcataaggcgccttgtcctccgggcacagcagcgcaccctgatctcacttaaatcagcacagtaactgcagcacagcaccacaatattgttcaaaatcccacagtgcaaggcgctgtatccaaagctcatggcggggaccacagaacccacgtggccatcataccacaagcgcaggtagattaagtggcgacccctcataaacacgctggacataaacattacctcttttggcatgttgtaattcaccacctcccggtaccatataaacctctgattaaacatggcgccatccaccaccatcctaaaccagctggccaaaacctgcccgccggctatacactgcagggaaccgggactggaacaatgacagtggagagcccaggactcgtaaccatggatcatcatgctcgtcatgatatcaatgttggcacaacacaggcacacgtgcatacacttcctcaggattacaagctcctcccgcgttagaaccatatcccagggaacaacccattcctgaatcagcgtaaatcccacactgcagggaagacctcgcacgtaactcacgttgtgcattgtcaaagtgttacattcgggcagcagcggatgatcctccagtatggtagcgcgggtttctgtctcaaaaggaggtagacgatccctactgtacggagtgcgccgagacaaccgagatcgtgttggtcgtagtgtcatgccaaatggaacgccggacgtagtcatatttcctgaagcaaaaccaggtgcgggcgtgacaaacagatctgcgtctccggtctcgccgcttagatcgctctgtgtagtagttgtagtatatccactctctcaaagcatccaggcgccccctggcttcgggttctatgtaaactccttcatgcgccgctgccctgataacatccaccaccgcagaataagccacacccagccaacctacacattcgttctgcgagtcacacacgggaggagcgggaagagctggaagaaccatgtttttttttttattccaaaagattatccaaaacctcaaaatgaagatctattaagtgaacgcgctcccctccggtggcgtggtcaaactctacagccaaagaacagataatggcatttgtaagatgttgcacaatggcttccaaaaggcaaacggccctcacgtccaagtggacgtaaaggctaaacccttcagggtgaatctcctctataaacattccagcaccttcaaccatgcccaaataattctcatctcgccaccttctcaatatatctctaagcaaatcccgaatattaagtccggccattgtaaaaatctgctccagagcgccctccaccttcagcctcaagcagcgaatcatgattgcaaaaattcaggttcctcacagacctgtataagattcaaaagcggaacattaacaaaaataccgcgatcccgtaggtcccttcgcagggccagctgaacataatcgtgcaggtctgcacggaccagcgcggccacttccccgccaggaaccatgacaaaagaacccacactgattatgacacgcatactcggagctatgctaaccagcgtagccccgatgtaagcttgttgcatgggcggcgatataaaatgcaaggtgctgctcaaaaaatcaggcaaagcctcgcgcaaaaaagaaagcacatcgtagtcatgctcatgcagataaaggcaggtaagctccggaaccaccacagaaaaagacaccatttttctctcaaacatgtctgcgggtttctgcataaacacaaaataaaataacaaaaaaacatttaaacattagaagcctgtcttacaacaggaaaaacaacccttataagcataagacggactacggccatgccggcgtgaccgtaaaaaaactggtcaccgtgattaaaaagcaccaccgacagctcctcggtcatgtccggagtcataatgtaagactcggtaaacacatcaggttgattcacatcggtcagtgctaaaaagcgaccgaaatagcccgggggaatacatacccgcaggcgtagagacaacattacagcccccataggaggtataacaaaattaataggagagaaaaacacataaacacctgaaaaaccctcctgcctaggcaaaatagcaccctcccgctccagaacaacatacagcgcttccacagcggcagccataacagtcagccttaccagtaaaaaagaaaacctattaaaaaaacaccactcgacacggcaccagctcaatcagtcacagtgtaaaaaagggccaagtgcagagcgagtatatataggactaaaaaatgacgtaacggttaaagtccacaaaaaacacccagaaaaccgcacgcgaacctacgcccagaaacgaaagccaaaaaacccacaacttcctcaaatcgtcacttccgttttcccacgttacgtcacttcccattttaagaaaactacaattcccaacacatacaagttactccgcccttaattaaatcggatccgatatctagatgtattcgcgaggtaccgagctcgaattctctggccgtcgttttacaacgtcgtgactgggaaaaccctggcgttacccaacttaatcgccttgcagcacatccccctttcgccagctggcgtaatagcgaagaggcccgcaccgatcgcccttcccaacagttgcgcagcctgaatggcgaatggcgcctgatgcggtattttctccttacgcatctgtgcggtatttcacaccgcatatggtgcactctcagtacaatctgctctgatgccgcatagttaagccagccccgacacccgccaacacccgctgacgcgccctgacgggcttgtctgctcccggcatccgcttacagacaagctgtgaccgtctccgggagctgcatgtgtcagaggttttcaccgtcatcaccgaaacgcgcga

SEQ ID NO: 50 - DNA, 8514 bp, Artificial Sequence
  Description of Artificial Sequence: Synthetic polynucleotide
tgcagctctggcccgtgtctcaaaatctctgatgttacattgcacaagataaaaatatatcatcatgaacaataaaactgtctgcttacataaacagtaatacaaggggtgttatgagccatattcaacgggaaacgtcgaggccgcgattaaattccaacatggatgctgatttatatgggtataaatgggctcgcgataatgtcgggcaatcaggtgcgacaatctatcgcttgtatgggaagcccgatgcgccagagttgtttctgaaacatggcaaaggtagcgttgccaatgatgttacagatgagatggtcagactaaactggctgacggaatttatgcctcttccgaccatcaagcattttatccgtactcctgatgatgcatggttactcaccactgcgatccccggaaaaacagcattccaggtattagaagaatatcctgattcaggtgaaaatattgttgatgcgctggcagtgttcctgcgccggttgcattcgattcctgtttgtaattgtccttttaacagcgatcgcgtatttcgtctcgctcaggcgcaatcacgaatgaataacggtttggttgatgcgagtgattttgatgacgagcgtaatggctggcctgttgaacaagtctggaaagaaatgcataaacttttgccattctcaccggattcagtcgtcactcatggtgatttctcacttgataaccttatttttgacgaggggaaattaataggttgtattgatgttggacgagtcggaatcgcagaccgataccaggatcttgccatcctatggaactgcctcggtgagttttctccttcattacagaaacggctttttcaaaaatatggtattgataatcctgatatgaataaattgcagtttcatttgatgctcgatgagtttttctaatcagaattggttaattggttgtaacattattcagattgggcttgatttaaaacttcatttttaatttaaaaggatctaggtgaagatcctttttgataatctcatgaccaaaatcccttaacgtgagttttcgttccactgagcgtcagaccccgtagaaaagatcaaaggatcttcttgagatcctttttttctgcgcgtaatctgctgcttgcaaacaaaaaaaccaccgctaccagcggtggtttgtttgccggatcaagagctaccaactctttttccgaaggtaactggcttcagcagagcgcagataccaaatactgttcttctagtgtagccgtagttaggccaccacttcaagaactctgtagcaccgcctacatacctcgctctgctaatcctgttaccagtggctgctgccagtggcgataagtcgtgtcttaccgggttggactcaagacgatagttaccggataaggcgcagcggtcgggctgaacggggggttcgtgcacacagcccagcttggagcgaacgacctacaccgaactgagatacctacagcgtgagctatgagaaagcgccacgcttcccgaagggagaaaggcggacaggtatccggtaagcggcagggtcggaacaggagagcgcacgagggagcttccagggggaaacgcctggtatctttatagtcctgtcgggtttcgccacctctgacttgagcgtcgatttttgtgatgctcgtcaggggggcggagcctatggaaaaacgccagcaacgcggcctttttacggttcctggccttttgctggccttttgctcacatgttctttcctgcgttatcccctgattctgtggataaccgtattaccgcctttgagtgagctgataccgctcgccgcagccgaacgaccgagcgcagcgagtcagtgagcgaggaagcggaagagcgcccaatacgcaaaccgcctctccccgcgcgttggccgattcattaatgcagctggcacgacaggtttcccgactggaaagcgggcagtgagcgcaacgcaattaatgtgagttagctcactcattaggcaccccaggctttacactttatgcttccggctcgtatgttgtgtggaattgtgagcggataacaatttcacacaggaaacagctatgaccatgattacaccaagcttgcatgcaggcctatccgtagatgtacctggacatccaggtgatgccggcggcggtggtggaggcgcgcggaaagtcgcggacgcggttccagatgttgcgcagcggcaaaaagtgctccatggtcgggacgctctggccggtgaggcgtgcgcagtcgttgacgctctagaccgtgcaaaaggagagcctgtaagcgggcactcttccgtggtctggtggataaattcgcaagggtatcatggcggacgaccggggttcgaaccccggatccggccgtccgccgtgatccatgcggttaccgcccgcgtgtcgaacccaggtgtgcgacgtcagacaacgggggagcgctccttttggcttccttccaggcgcggcggctgctgcgctagcttttttggccactggccgcgcgcggcgtaagcggttaggctggaaagcgaaagcattaagtggctcgctccctgtagccggagggttattttccaagggttgagtcgcaggacccccggttcgagtctcgggccggccggactgcggcgaacgggggtttgcctccccgtcatgcaagaccccgcttgcaaattcctccggaaacagggacgagccccttttttgcttttcccagatgcatccggtgctgcggcagatgcgcccccctcctcagcagcggcaagagcaagagcagcggcagacatgcagggcaccctccccttctcctaccgcgtcaggaggggcaacatctgtacactctcgggtgattatttacccccacccttgccgtctgcgccgtttaaaaatcaaaggggttctgccgcgcatcgctatgcgccactggcagggacacgttgcgatactggtgtttagtgctccacttaaactcaggcacaaccatccgcggcagctcggtgaagttttcactccacaggctgcgcaccatcaccaacgcgtttagcaggtcgggcgccgatatcttgaagtcgcagttggggcctccgccctgcgcgcgcgagttgcgatacacagggttgcagcactggaacactatcagcgccgggtggtgcacgctggccagcacgctcttgtcggagatcagatccgcgtccaggtcctccgcgttgctcagggcgaacggagtcaactttggtagctgccttcccaaaaagggcgcgtgcccaggctttgagttgcactcgcaccgtagtggcatcaaaaggtgaccgtgcccggtctgggcgttaggatacagcgcctgcataaaagccttgatctgcttaaaagccacctgagcctttgcgccttcagagaagaacatgccgcaagacttgccggaaaactgattggccggacaggccgcgtcgtgcacgcagcaccttgcgtcggtgttggagatctgcaccacatttcggccccaccggttcttcacgatcttggccttgctagactgctccttcagcgcgcgctgcccgttttcgctcgtcacatccatttcaatcacgtgctccttatttatcataatgcttccgtgtagacacttaagctcgccttcgatctcagcgcagcggtgcagccacaacgcgcagcccgtgggctcgtgatgcttgtaggtcacctctgcaaacgactgcaggtacgcctgcaggaatcgccccatcatcgtcacaaaggtcttgttgctggtgaaggtcagctgcaacccgcggtgctcctcgttcagccaggtcttgcatacggccgccagagcttccacttggtcaggcagtagtttgaagttcgcctttagatcgttatccacgtggtacttgtccatcagcgcgcgcgcagcctccatgcccttctcccacgcagacacgatcggcacactcagcgggttcatcaccgtaatttcactttccgcttcgctgggctcttcctcttcctcttgcgtccgcataccacgcgccactgggtcgtcttcattcagccgccgcactgtgcgcttacctcctttgccatgcttgattagcaccggtgggttgctgaaacccaccatttgtagcgccacatcttctctttcttcctcgctgtccacgattacctctggtgatggcgggcgctcgggcttgggagaagggcgcttctttttcttcttgggcgcaatggccaaatccgccgccgaggtcgatggccgcgggctgggtgtgcgcggcaccagcgcgtcttgtgatgagtcttcctcgtcctcggactcgatacgccgcctcatccgcttttttgggggcgcccggggaggcggcggcgacggggacggggacgacacgtcctccatggttgggggacgtcgcgccgcaccgcgtccgcgctcgggggtggtttcgcgctgctcctcttcccgactggccatttccttctcctataggcagaaaaagatccacaaaagcgaagatcagcttcggcgcacgctggaagacgcggaggctctcttcagtaaatactgcgcgctgactcttaaggactagtttcgcgccctttctcaaatttaagcgcgaaaactacgtcatctccagcggccacacccggcgccagcacctgttgtcagcgccattggcgcgcccgcccgccgcgcgcttcgctttttatagggccgccgccgccgccgcctcgccataaaaggaaactttcggagcgcgccgctctgattggctgccgccgcacctctccgcctcgccccgccccgcccctcgccccgccccgccccgcctggcgcgcgccccccccccccccccgcccccatcgctgcacaaaataattaaaaaataaataaatacaaaattgggggtggggaggggggggagatggggagagtgaagcagaacgtggggctcacctcgaggccggccgaatatcttcatttaaatgtttaaacatcgatgcggccgccgtttgtgttatgtttcaacgtgtttatttttcaattgcagaaaatttcaagtcatttttcattcagtagtatagccccaccaccacatagcttatacagatcaccgtaccttaatcaaactcacagaaccctagtattcaacctgccacctccctcccaacacacagagtacacagtcctttctccccggctggccttaaaaagcatcatatcatgggtaacagacatattcttaggtgttatattccacacggtttcctgtcgagccaaacgctcatcagtgatattaataaactccccgggcagctcacttaagttcatgtcgctgtccagctgctgagccacaggctgctgtccaacttgcggttgcttaacgggcggcgaaggagaagtccacgcctacatgggggtagagtcataatcgtgcatcaggatagggcggtggtgctgcagcagcgcgcgaataaactgctgccgccgccgctccgtcctgcaggaatacaacatggcagtggtctcctcagcgatgattcgcaccgcccgcagcataaggcgccttgtcctccgggcacagcagcgcaccctgatctcacttaaatcagcacagtaactgcagcacagcaccacaatattgttcaaaatcccacagtgcaaggcgctgtatccaaagctcatggcggggaccacagaacccacgtggccatcataccacaagcgcaggtagattaagtggcgacccctcataaacacgctggacataaacattacctcttttggcatgttgtaattcaccacctcccggtaccatataaacctctgattaaacatggcgccatccaccaccatcctaaaccagctggccaaaacctgcccgccggctatacactgcagggaaccgggactggaacaatgacagtggagagcccaggactcgtaaccatggatcatcatgctcgtcatgatatcaatgttggcacaacacaggcacacgtgcatacacttcctcaggattacaagctcctcccgcgttagaaccatatcccagggaacaacccattcctgaatcagcgtaaatcccacactgcagggaagacctcgcacgtaactcacgttgtgcattgtcaaagtgttacattcgggcagcagcggatgatcctccagtatggtagcgcgggtttctgtctcaaaaggaggtagacgatccctactgtacggagtgcgccgagacaaccgagatcgtgttggtcgtagtgtcatgccaaatggaacgccggacgtagtcatatttcctgaagcaaaaccaggtgcgggcgtgacaaacagatctgcgtctccggtctcgccgcttagatcgctctgtgtagtagttgtagtatatccactctctcaaagcatccaggcgccccctggcttcgggttctatgtaaactccttcatgcgccgctgccctgataacatccaccaccgcagaataagccacacccagccaacctacacattcgttctgcgagtcacacacgggaggagcgggaagagctggaagaaccatgtttttttttttattccaaaagattatccaaaacctcaaaatgaagatctattaagtgaacgcgctcccctccggtggcgtggtcaaactctacagccaaagaacagataatggcatttgtaagatgttgcacaatggcttccaaaaggcaaacggccctcacgtccaagtggacgtaaaggctaaacccttcagggtgaatctcctctataaacattccagcaccttcaaccatgcccaaataattctcatctcgccaccttctcaatatatctctaagcaaatcccgaatattaagtccggccattgtaaaaatctgctccagagcgccctccaccttcagcctcaagcagcgaatcatgattgcaaaaattcaggttcctcacagacctgtataagattcaaaagcggaacattaacaaaaataccgcgatcccgtaggtcccttcgcagggccagctgaacataatcgtgcaggtctgcacggaccagcgcggccacttccccgccaggaaccatgacaaaagaacccacactgattatgacacgcatactcggagctatgctaaccagcgtagccccgatgtaagcttgttgcatgggcggcgatataaaatgcaaggtgctgctcaaaaaatcaggcaaagcctcgcgcaaaaaagaaagcacatcgtagtcatgctcatgcagataaaggcaggtaagctccggaaccaccacagaaaaagacaccatttttctctcaaacatgtctgcgggtttctgcataaacacaaaataaaataacaaaaaaacatttaaacattagaagcctgtcttacaacaggaaaaacaacccttataagcataagacggactacggccatgccggcgtgaccgtaaaaaaactggtcaccgtgattaaaaagcaccaccgacagctcctcggtcatgtccggagtcataatgtaagactcggtaaacacatcaggttgattcacatcggtcagtgctaaaaagcgaccgaaatagcccgggggaatacatacccgcaggcgtagagacaacattacagcccccataggaggtataacaaaattaataggagagaaaaacacataaacacctgaaaaaccctcctgcctaggcaaaatagcaccctcccgctccagaacaacatacagcgcttccacagcggcagccataacagtcagccttaccagtaaaaaagaaaacctattaaaaaaacaccactcgacacggcaccagctcaatcagtcacagtgtaaaaaagggccaagtgcagagcgagtatatataggactaaaaaatgacgtaacggttaaagtccacaaaaaacacccagaaaaccgcacgcgaacctacgcccagaaacgaaagccaaaaaacccacaacttcctcaaatcgtcacttccgttttcccacgttacgtcacttcccattttaagaaaactacaattcccaacacatacaagttactccgcccttaattaaatcggatccgatatctagatgtattcgcgaggtaccgagctcgaattctctggccgtcgttttacaacgtcgtgactgggaaaaccctggcgttacccaacttaatcgccttgcagcacatccccctttcgccagctggcgtaatagcgaagaggcccgcaccgatcgcccttcccaacagttgcgcagcctgaatggcgaatggcgcctgatgcggtattttctccttacgcatctgtgcggtatttcacaccgcatatggtgcactctcagtacaatctgctctgatgccgcatagttaagccagccccgacacccgccaacacccgctgacgcgccctgacgggcttgtctgctcccggcatccgcttacagacaagctgtgaccgtctccgggagctgcatgtgtcagaggttttcaccgtcatcaccgaaacgcgcga

SEQ ID NO: 51 - DNA, 8649 bp, Artificial Sequence
  Description of Artificial Sequence: Synthetic polynucleotide
tgcagctctggcccgtgtctcaaaatctctgatgttacattgcacaagataaaaatatatcatcatgaacaataaaactgtctgcttacataaacagtaatacaaggggtgttatgagccatattcaacgggaaacgtcgaggccgcgattaaattccaacatggatgctgatttatatgggtataaatgggctcgcgataatgtcgggcaatcaggtgcgacaatctatcgcttgtatgggaagcccgatgcgccagagttgtttctgaaacatggcaaaggtagcgttgccaatgatgttacagatgagatggtcagactaaactggctgacggaatttatgcctcttccgaccatcaagcattttatccgtactcctgatgatgcatggttactcaccactgcgatccccggaaaaacagcattccaggtattagaagaatatcctgattcaggtgaaaatattgttgatgcgctggcagtgttcctgcgccggttgcattcgattcctgtttgtaattgtccttttaacagcgatcgcgtatttcgtctcgctcaggcgcaatcacgaatgaataacggtttggttgatgcgagtgattttgatgacgagcgtaatggctggcctgttgaacaagtctggaaagaaatgcataaacttttgccattctcaccggattcagtcgtcactcatggtgatttctcacttgataaccttatttttgacgaggggaaattaataggttgtattgatgttggacgagtcggaatcgcagaccgataccaggatcttgccatcctatggaactgcctcggtgagttttctccttcattacagaaacggctttttcaaaaatatggtattgataatcctgatatgaataaattgcagtttcatttgatgctcgatgagtttttctaatcagaattggttaattggttgtaacattattcagattgggcttgatttaaaacttcatttttaatttaaaaggatctaggtgaagatcctttttgataatctcatgaccaaaatcccttaacgtgagttttcgttccactgagcgtcagaccccgtagaaaagatcaaaggatcttcttgagatcctttttttctgcgcgtaatctgctgcttgcaaacaaaaaaaccaccgctaccagcggtggtttgtttgccggatcaagagctaccaactctttttccgaaggtaactggcttcagcagagcgcagataccaaatactgttcttctagtgtagccgtagttaggccaccacttcaagaactctgtagcaccgcctacatacctcgctctgctaatcctgttaccagtggctgctgccagtggcgataagtcgtgtcttaccgggttggactcaagacgatagttaccggataaggcgcagcggtcgggctgaacggggggttcgtgcacacagcccagcttggagcgaacgacctacaccgaactgagatacctacagcgtgagctatgagaaagcgccacgcttcccgaagggagaaaggcggacaggtatccggtaagcggcagggtcggaacaggagagcgcacgagggagcttccagggggaaacgcctggtatctttatagtcctgtcgggtttcgccacctctgacttgagcgtcgatttttgtgatgctcgtcaggggggcggagcctatggaaaaacgccagcaacgcggcctttttacggttcctggccttttgctggccttttgctcacatgttctttcctgcgttatcccctgattctgtggataaccgtattaccgcctttgagtgagctgataccgctcgccgcagccgaacgaccgagcgcagcgagtcagtgagcgaggaagcggaagagcgcccaatacgcaaaccgcctctccccgcgcgttggccgattcattaatgcagctggcacgacaggtttcccgactggaaagcgggcagtgagcgcaacgcaattaatgtgagttagctcactcattaggcaccccaggctttacactttatgcttccggctcgtatgttgtgtggaattgtgagcggataacaatttcacacaggaaacagctatgaccatgattacaccaagcttgcatgcaggcctatccgtagatgtacctggacatccaggtgatgccggcggcggtggtggaggcgcgcggaaagtcgcggacgcggttccagatgttgcgcagcggcaaaaagtgctccatggtcgggacgctctggccggtgaggcgtgcgcagtcgttgacgctctagaccgtgcaaaaggagagcctgtaagcgggcactcttccgtggtctggtggataaattcgcaagggtatcatggcggacgaccggggttcgaaccccggatccggccgtccgccgtgatccatgcggttaccgcccgcgtgtcgaacccaggtgtgcgacgtcagacaacgggggagcgctccttttggcttccttccaggcgcggcggctgctgcgctagcttttttggccactggccgcgcgcggcgtaagcggttaggctggaaagcgaaagcattaagtggctcgctccctgtagccggagggttattttccaagggttgagtcgcaggacccccggttcgagtctcgggccggccggactgcggcgaacgggggtttgcctccccgtcatgcaagaccccgcttgcaaattcctccggaaacagggacgagccccttttttgcttttcccagatgcatccggtgctgcggcagatgcgcccccctcctcagcagcggcaagagcaagagcagcggcagacatgcagggcaccctccccttctcctaccgcgtcaggaggggcaacatcgatccagacatgataagatacattgatgagtttggacaaaccacaactagaatgcagtgaaaaaaatgctttatttgtgaaatttgtgatgctattgctttatttgtaaccattataagctgcaataaacaagtttgtacactctcgggtgattatttacccccacccttgccgtctgcgccgtttaaaaatcaaaggggttctgccgcgcatcgctatgcgccactggcagggacacgttgcgatactggtgtttagtgctccacttaaactcaggcacaaccatccgcggcagctcggtgaagttttcactccacaggctgcgcaccatcaccaacgcgtttagcaggtcgggcgccgatatcttgaagtcgcagttggggcctccgccctgcgcgcgcgagttgcgatacacagggttgcagcactggaacactatcagcgccgggtggtgcacgctggccagcacgctcttgtcggagatcagatccgcgtccaggtcctccgcgttgctcagggcgaacggagtcaactttggtagctgccttcccaaaaagggcgcgtgcccaggctttgagttgcactcgcaccgtagtggcatcaaaaggtgaccgtgcccggtctgggcgttaggatacagcgcctgcataaaagccttgatctgcttaaaagccacctgagcctttgcgccttcagagaagaacatgccgcaagacttgccggaaaactgattggccggacaggccgcgtcgtgcacgcagcaccttgcgtcggtgttggagatctgcaccacatttcggccccaccggttcttcacgatcttggccttgctagactgctccttcagcgcgcgctgcccgttttcgctcgtcacatccatttcaatcacgtgctccttatttatcataatgcttccgtgtagacacttaagctcgccttcgatctcagcgcagcggtgcagccacaacgcgcagcccgtgggctcgtgatgcttgtaggtcacctctgcaaacgactgcaggtacgcctgcaggaatcgccccatcatcgtcacaaaggtcttgttgctggtgaaggtcagctgcaacccgcggtgctcctcgttcagccaggtcttgcatacggccgccagagcttccacttggtcaggcagtagtttgaagttcgcctttagatcgttatccacgtggtacttgtccatcagcgcgcgcgcagcctccatgcccttctcccacgcagacacgatcggcacactcagcgggttcatcaccgtaatttcactttccgcttcgctgggctcttcctcttcctcttgcgtccgcataccacgcgccactgggtcgtcttcattcagccgccgcactgtgcgcttacctcctttgccatgcttgattagcaccggtgggttgctgaaacccaccatttgtagcgccacatcttctctttcttcctcgctgtccacgattacctctggtgatggcgggcgctcgggcttgggagaagggcgcttctttttcttcttgggcgcaatggccaaatccgccgccgaggtcgatggccgcgggctgggtgtgcgcggcaccagcgcgtcttgtgatgagtcttcctcgtcctcggactcgatacgccgcctcatccgcttttttgggggcgcccggggaggcggcggcgacggggacggggacgacacgtcctccatggttgggggacgtcgcgccgcaccgcgtccgcgctcgggggtggtttcgcgctgctcctcttcccgactggccatttccttctcctataggcagaaaaagatccacaaaagcgaagatcagcttcggcgcacgctggaagacgcggaggctctcttcagtaaatactgcgcgctgactcttaaggactagtttcgcgccctttctcaaatttaagcgcgaaaactacgtcatctccagcggccacacccggcgccagcacctgttgtcagcgccattggcgcgcccgcccgccgcgcgcttcgctttttatagggccgccgccgccgccgcctcgccataaaaggaaactttcggagcgcgccgctctgattggctgccgccgcacctctccgcctcgccccgccccgcccctcgccccgccccgccccgcctggcgcgcgccccccccccccccccgcccccatcgctgcacaaaataattaaaaaataaataaatacaaaattgggggtggggaggggggggagatggggagagtgaagcagaacgtggggctcacctcgaggccggccgaatatcttcatttaaatgtttaaacatcgatgcggccgccgtttgtgttatgtttcaacgtgtttatttttcaattgcagaaaatttcaagtcatttttcattcagtagtatagccccaccaccacatagcttatacagatcaccgtaccttaatcaaactcacagaaccctagtattcaacctgccacctccctcccaacacacagagtacacagtcctttctccccggctggccttaaaaagcatcatatcatgggtaacagacatattcttaggtgttatattccacacggtttcctgtcgagccaaacgctcatcagtgatattaataaactccccgggcagctcacttaagttcatgtcgctgtccagctgctgagccacaggctgctgtccaacttgcggttgcttaacgggcggcgaaggagaagtccacgcctacatgggggtagagtcataatcgtgcatcaggatagggcggtggtgctgcagcagcgcgcgaataaactgctgccgccgccgctccgtcctgcaggaatacaacatggcagtggtctcctcagcgatgattcgcaccgcccgcagcataaggcgccttgtcctccgggcacagcagcgcaccctgatctcacttaaatcagcacagtaactgcagcacagcaccacaatattgttcaaaatcccacagtgcaaggcgctgtatccaaagctcatggcggggaccacagaacccacgtggccatcataccacaagcgcaggtagattaagtggcgacccctcataaacacgctggacataaacattacctcttttggcatgttgtaattcaccacctcccggtaccatataaacctctgattaaacatggcgccatccaccaccatcctaaaccagctggccaaaacctgcccgccggctatacactgcagggaaccgggactggaacaatgacagtggagagcccaggactcgtaaccatggatcatcatgctcgtcatgatatcaatgttggcacaacacaggcacacgtgcatacacttcctcaggattacaagctcctcccgcgttagaaccatatcccagggaacaacccattcctgaatcagcgtaaatcccacactgcagggaagacctcgcacgtaactcacgttgtgcattgtcaaagtgttacattcgggcagcagcggatgatcctccagtatggtagcgcgggtttctgtctcaaaaggaggtagacgatccctactgtacggagtgcgccgagacaaccgagatcgtgttggtcgtagtgtcatgccaaatggaacgccggacgtagtcatatttcctgaagcaaaaccaggtgcgggcgtgacaaacagatctgcgtctccggtctcgccgcttagatcgctctgtgtagtagttgtagtatatccactctctcaaagcatccaggcgccccctggcttcgggttctatgtaaactccttcatgcgccgctgccctgataacatccaccaccgcagaataagccacacccagccaacctacacattcgttctgcgagtcacacacgggaggagcgggaagagctggaagaaccatgtttttttttttattccaaaagattatccaaaacctcaaaatgaagatctattaagtgaacgcgctcccctccggtggcgtggtcaaactctacagccaaagaacagataatggcatttgtaagatgttgcacaatggcttccaaaaggcaaacggccctcacgtccaagtggacgtaaaggctaaacccttcagggtgaatctcctctataaacattccagcaccttcaaccatgcccaaataattctcatctcgccaccttctcaatatatctctaagcaaatcccgaatattaagtccggccattgtaaaaatctgctccagagcgccctccaccttcagcctcaagcagcgaatcatgattgcaaaaattcaggttcctcacagacctgtataagattcaaaagcggaacattaacaaaaataccgcgatcccgtaggtcccttcgcagggccagctgaacataatcgtgcaggtctgcacggaccagcgcggccacttccccgccaggaaccatgacaaaagaacccacactgattatgacacgcatactcggagctatgctaaccagcgtagccccgatgtaagcttgttgcatgggcggcgatataaaatgcaaggtgctgctcaaaaaatcaggcaaagcctcgcgcaaaaaagaaagcacatcgtagtcatgctcatgcagataaaggcaggtaagctccggaaccaccacagaaaaagacaccatttttctctcaaacatgtctgcgggtttctgcataaacacaaaataaaataacaaaaaaacatttaaacattagaagcctgtcttacaacaggaaaaacaacccttataagcataagacggactacggccatgccggcgtgaccgtaaaaaaactggtcaccgtgattaaaaagcaccaccgacagctcctcggtcatgtccggagtcataatgtaagactcggtaaacacatcaggttgattcacatcggtcagtgctaaaaagcgaccgaaatagcccgggggaatacatacccgcaggcgtagagacaacattacagcccccataggaggtataacaaaattaataggagagaaaaacacataaacacctgaaaaaccctcctgcctaggcaaaatagcaccctcccgctccagaacaacatacagcgcttccacagcggcagccataacagtcagccttaccagtaaaaaagaaaacctattaaaaaaacaccactcgacacggcaccagctcaatcagtcacagtgtaaaaaagggccaagtgcagagcgagtatatataggactaaaaaatgacgtaacggttaaagtccacaaaaaacacccagaaaaccgcacgcgaacctacgcccagaaacgaaagccaaaaaacccacaacttcctcaaatcgtcacttccgttttcccacgttacgtcacttcccattttaagaaaactacaattcccaacacatacaagttactccgcccttaattaaatcggatccgatatctagatgtattcgcgaggtaccgagctcgaattctctggccgtcgttttacaacgtcgtgactgggaaaaccctggcgttacccaacttaatcgccttgcagcacatccccctttcgccagctggcgtaatagcgaagaggcccgcaccgatcgcccttcccaacagttgcgcagcctgaatggcgaatggcgcctgatgcggtattttctccttacgcatctgtgcggtatttcacaccgcatatggtgcactctcagtacaatctgctctgatgccgcatagttaagccagccccgacacccgccaacacccgctgacgcgccctgacgggcttgtctgctcccggcatccgcttacagacaagctgtgaccgtctccgggagctgcatgtgtcagaggttttcaccgtcatcaccgaaacgcgcga

SEQ ID NO: 52 - DNA, 9166 bp, Artificial Sequence
  Description of Artificial Sequence: Synthetic polynucleotide
tgcagctctggcccgtgtctcaaaatctctgatgttacattgcacaagataaaaatatatcatcatgaacaataaaactgtctgcttacataaacagtaatacaaggggtgttatgagccatattcaacgggaaacgtcgaggccgcgattaaattccaacatggatgctgatttatatgggtataaatgggctcgcgataatgtcgggcaatcaggtgcgacaatctatcgcttgtatgggaagcccgatgcgccagagttgtttctgaaacatggcaaaggtagcgttgccaatgatgttacagatgagatggtcagactaaactggctgacggaatttatgcctcttccgaccatcaagcattttatccgtactcctgatgatgcatggttactcaccactgcgatccccggaaaaacagcattccaggtattagaagaatatcctgattcaggtgaaaatattgttgatgcgctggcagtgttcctgcgccggttgcattcgattcctgtttgtaattgtccttttaacagcgatcgcgtatttcgtctcgctcaggcgcaatcacgaatgaataacggtttggttgatgcgagtgattttgatgacgagcgtaatggctggcctgttgaacaagtctggaaagaaatgcataaacttttgccattctcaccggattcagtcgtcactcatggtgatttctcacttgataaccttatttttgacgaggggaaattaataggttgtattgatgttggacgagtcggaatcgcagaccgataccaggatcttgccatcctatggaactgcctcggtgagttttctccttcattacagaaacggctttttcaaaaatatggtattgataatcctgatatgaataaattgcagtttcatttgatgctcgatgagtttttctaatcagaattggttaattggttgtaacattattcagattgggcttgatttaaaacttcatttttaatttaaaaggatctaggtgaagatcctttttgataatctcatgaccaaaatcccttaacgtgagttttcgttccactgagcgtcagaccccgtagaaaagatcaaaggatcttcttgagatcctttttttctgcgcgtaatctgctgcttgcaaacaaaaaaaccaccgctaccagcggtggtttgtttgccggatcaagagctaccaactctttttccgaaggtaactggcttcagcagagcgcagataccaaatactgttcttctagtgtagccgtagttaggccaccacttcaagaactctgtagcaccgcctacatacctcgctctgctaatcctgttaccagtggctgctgccagtggcgataagtcgtgtcttaccgggttggactcaagacgatagttaccggataaggcgcagcggtcgggctgaacggggggttcgtgcacacagcccagcttggagcgaacgacctacaccgaactgagatacctacagcgtgagctatgagaaagcgccacgcttcccgaagggagaaaggcggacaggtatccggtaagcggcagggtcggaacaggagagcgcacgagggagcttccagggggaaacgcctggtatctttatagtcctgtcgggtttcgccacctctgacttgagcgtcgatttttgtgatgctcgtcaggggggcggagcctatggaaaaacgccagcaacgcggcctttttacggttcctggccttttgctggccttttgctcacatgttctttcctgcgttatcccctgattctgtggataaccgtattaccgcctttgagtgagctgataccgctcgccgcagccgaacgaccgagcgcagcgagtcagtgagcgaggaagcggaagagcgcccaatacgcaaaccgcctctccccgcgcgttggccgattcattaatgcagctggcacgacaggtttcccgactggaaagcgggcagtgagcgcaacgcaattaatgtgagttagctcactcattaggcaccccaggctttacactttatgcttccggctcgtatgttgtgtggaattgtgagcggataacaatttcacacaggaaacagctatgaccatgattacaccaagcttgcatgcaggcctctgcagtcgaccagaagcaccatgtccttgggtccggcctgctgaatgcgcaggcggtcggccatgccccaggcttcgttttgacatcggcgcaggtctttgtagtagtcttgcatgagcctttctaccggcacttcttcttctccttcctcttgtcctgcatctcttgcatctatcgctgcggcggcggcggagtttggccgtaggtggcgccctcttcctcccatgcgtgtgaccccgaagcccctcatcggctgaagcagggctaggtcggcgacaacgcgctcggctaatatggcctgctgcacctgcgtgagggtagactggaagtcatccatgtccacaaagcggtggtatgcgcccgtgttgatggtgtaagtgcagttggccataacggaccagttaacggtctggtgacccggctgcgagagctcggtgtacctgagacgcgagtaagccctcgagtcaaatacgtagtcgttgcaagtccgcaccaggtactggtatcccaccaaaaagtgcggcggcggctggcggtagaggggccagcgtagggtggccggggctccgggggcgagatcttccaacataaggcgatgatatccgtagatgtacctggacatccaggtgatgccggcggcggtggtggaggcgcgcggaaagtcgcggacgcggttccagatgttgcgcagcggcaaaaagtgctccatggtcgggacgctctggccggtcaggcgcgcgcaatcgttgacgctctagcgtgcaaaaggagagcctgtaagcgggcactcttccgtggtctggtggataaattcgcaagggtatcatggcggacgaccggggttcgagccccgtatccggccgtccgccgtgatccatgcggttaccgcccgcgtgtcgaacccaggtgtgcgacgtcagacaacgggggagtgctccttttggcttccttccaggcgcggcggctgctgcgctagcttttttggccactggccgcgcgcagcgtaagcggttaggctggaaagcgaaagcattaagtggctcgctccctgtagccggagggttattttccaagggttgagtcgcgggacccccggttcgagtctcggaccgagactgggggcgtacactggatggcctttgcctggaacccgcactcaaaaacatgctacctctttgagccctttggcttttctgaccagcgactcaagcaggtttaccagtttgagtacgagtcactcctgcgccgtagcgccattgcttcttcccccgaccgctgtataacgctggaaaagtccacccaaagcgtacaggggcccaactcggccgcctgtggactattctgctgcatgtttctccacgcctttgccaactggccccaaactcccatggatcacaaccccaccatgaaccttattaccggggtacccaactccatgctcaacagtccccaggtacagcccaccctgcgtcgcaaccaggaacagctctacagcttcctggagcgccactcgccctacttccgcagccacagtgcgcagattaggagcgccacttctttttgtcacttgaaaaacatgtaaaaataatgtactagagacactttcaataaaggcaaatgcttttatttgtacactctcgggtgattatttacccccacccttgccgtctgcgccgtttaaaaatcaaaggggttctgccgcgcatcgctatgcgccactggcagggacacgttgcgatactggtgtttagtgctccacttaaactcaggcacaaccatccgcggcagctcggtgaagttttcactccacaggctgcgcaccatcaccaacgcgtttagcaggtcgggcgccgatatcttgaagtcgcagttggggcctccgccctgcgcgcgcgagttgcgatacacagggttgcagcactggaacactatcagcgccgggtggtgcacgctggccagcacgctcttgtcggagatcagatccgcgtccaggtcctccgcgttgctcagggcgaacggagtcaactttggtagctgccttcccaaaaagggcgcgtgcccaggctttgagttgcactcgcaccgtagtggcatcaaaaggtgaccgtgcccggtctgggcgttaggatacagcgcctgcataaaagccttgatctgcttaaaagccacctgagcctttgcgccttcagagaagaacatgccgcaagacttgccggaaaactgattggccggacaggccgcgtcgtgcacgcagcaccttgcgtcggtgttggagatctgcaccacatttcggccccaccggttcttcacgatcttggccttgctagactgctccttcagcgcgcgctgcccgttttcgctcgtcacatccatttcaatcacgtgctccttatttatcataatgcttccgtgtagacacttaagctcgccttcgatctcagcgcagcggtgcagccacaacgcgcagcccgtgggctcgtgatgcttgtaggtcacctctgcaaacgactgcaggtacgcctgcaggaatcgccccatcatcgtcacaaaggtcttgttgctggtgaaggtcagctgcaacccgcggtgctcctcgttcagccaggtcttgcatacggccgccagagcttccacttggtcaggcagtagtttgaagttcgcctttagatcgttatccacgtggtacttgtccatcagcgcgcgcgcagcctccatgcccttctcccacgcagacacgatcggcacactcagcgggttcatcaccgtaatttcactttccgcttcgctgggctcttcctcttcctcttgcgtccgcataccacgcgccactgggtcgtcttcattcagccgccgcactgtgcgcttacctcctttgccatgcttgattagcaccggtgggttgctgaaacccaccatttgtagcgccacatcttctctttcttcctcgctgtccacgattacctctggtgatggcgggcgctcgggcttgggagaagggcgcttctttttcttcttgggcgcaatggccaaatccgccgccgaggtcgatggccgcgggctgggtgtgcgcggcaccagcgcgtcttgtgatgagtcttcctcgtcctcggactcgatacgccgcctcatccgcttttttgggggcgcccggggaggcggcggcgacggggacggggacgacacgtcctccatggttgggggacgtcgcgccgcaccgcgtccgcgctcgggggtggtttcgcgctgctcctcttcccgactggccatttccttctcctataggcagaaaaagatccacaaaagcgaagatcagcttcggcgcacgctggaagacgcggaggctctcttcagtaaatactgcgcgctgactcttaaggactagtttcgcgccctttctcaaatttaagcgcgaaaactacgtcatctccagcggccacacccggcgccagcacctgttgtcagcgccattggcgcgcccgcccgccgcgcgcttcgctttttatagggccgccgccgccgccgcctcgccataaaaggaaactttcggagcgcgccgctctgattggctgccgccgcacctctccgcctcgccccgccccgcccctcgccccgccccgccccgcctggcgcgcgccccccccccccccccgcccccatcgctgcacaaaataattaaaaaataaataaatacaaaattgggggtggggaggggggggagatggggagagtgaagcagaacgtggggctcacctcgaggccggccgaatatcttcatttaaatgtttaaacatcgatgcggccgcaacttgtttattgcagcttataatggttacaaataaagcaatagcatcacaaatttcacaaataaagcatttttttcactgcattctagttgtggtttgtccaaactcatcaatgtatcttagcttaacgggcggcgaaggagaagtccacgcctacatgggggtagagtcataatcgtgcatcaggatagggcggtggtgctgcagcagcgcgcgaataaactgctgccgccgccgctccgtcctgcaggaatacaacatggcagtggtctcctcagcgatgattcgcaccgcccgcagcataaggcgccttgtcctccgggcacagcagcgcaccctgatctcacttaaatcagcacagtaactgcagcacagcaccacaatattgttcaaaatcccacagtgcaaggcgctgtatccaaagctcatggcggggaccacagaacccacgtggccatcataccacaagcgcaggtagattaagtggcgacccctcataaacacgctggacataaacattacctcttttggcatgttgtaattcaccacctcccggtaccatataaacctctgattaaacatggcgccatccaccaccatcctaaaccagctggccaaaacctgcccgccggctatacactgcagggaaccgggactggaacaatgacagtggagagcccaggactcgtaaccatggatcatcatgctcgtcatgatatcaatgttggcacaacacaggcacacgtgcatacacttcctcaggattacaagctcctcccgcgttagaaccatatcccagggaacaacccattcctgaatcagcgtaaatcccacactgcagggaagacctcgcacgtaactcacgttgtgcattgtcaaagtgttacattcgggcagcagcggatgatcctccagtatggtagcgcgggtttctgtctcaaaaggaggtagacgatccctactgtacggagtgcgccgagacaaccgagatcgtgttggtcgtagtgtcatgccaaatggaacgccggacgtagtcatatttcctgaagcaaaaccaggtgcgggcgtgacaaacagatctgcgtctccggtctcgccgcttagatcgctctgtgtagtagttgtagtatatccactctctcaaagcatccaggcgccccctggcttcgggttctatgtaaactccttcatgcgccgctgccctgataacatccaccaccgcagaataagccacacccagccaacctacacattcgttctgcgagtcacacacgggaggagcgggaagagctggaagaaccatgtttttttttttattccaaaagattatccaaaacctcaaaatgaagatctattaagtgaacgcgctcccctccggtggcgtggtcaaactctacagccaaagaacagataatggcatttgtaagatgttgcacaatggcttccaaaaggcaaacggccctcacgtccaagtggacgtaaaggctaaacccttcagggtgaatctcctctataaacattccagcaccttcaaccatgcccaaataattctcatctcgccaccttctcaatatatctctaagcaaatcccgaatattaagtccggccattgtaaaaatctgctccagagcgccctccaccttcagcctcaagcagcgaatcatgattgcaaaaattcaggttcctcacagacctgtataagattcaaaagcggaacattaacaaaaataccgcgatcccgtaggtcccttcgcagggccagctgaacataatcgtgcaggtctgcacggaccagcgcggccacttccccgccaggaaccatgacaaaagaacccacactgattatgacacgcatactcggagctatgctaaccagcgtagccccgatgtaagcttgttgcatgggcggcgatataaaatgcaaggtgctgctcaaaaaatcaggcaaagcctcgcgcaaaaaagaaagcacatcgtagtcatgctcatgcagataaaggcaggtaagctccggaaccaccacagaaaaagacaccatttttctctcaaacatgtctgcgggtttctgcataaacacaaaataaaataacaaaaaaacatttaaacattagaagcctgtcttacaacaggaaaaacaacccttataagcataagacggactacggccatgccggcgtgaccgtaaaaaaactggtcaccgtgattaaaaagcaccaccgacagctcctcggtcatgtccggagtcataatgtaagactcggtaaacacatcaggttgattcacatcggtcagtgctaaaaagcgaccgaaatagcccgggggaatacatacccgcaggcgtagagacaacattacagcccccataggaggtataacaaaattaataggagagaaaaacacataaacacctgaaaaaccctcctgcctaggcaaaatagcaccctcccgctccagaacaacatacagcgcttccacagcggcagccataacagtcagccttaccagtaaaaaagaaaacctattaaaaaaacaccactcgacacggcaccagctcaatcagtcacagtgtaaaaaagggccaagtgcagagcgagtatatataggactaaaaaatgacgtaacggttaaagtccacaaaaaacacccagaaaaccgcacgcgaacctacgcccagaaacgaaagccaaaaaacccacaacttcctcaaatcgtcacttccgttttcccacgttacgtcacttcccattttaagaaaactacaattcccaacacatacaagttactccgcccttaattaaatcggatccgatatctagatgtattcgcgaggtaccgagctcgaattctctggccgtcgttttacaacgtcgtgactgggaaaaccctggcgttacccaacttaatcgccttgcagcacatccccctttcgccagctggcgtaatagcgaagaggcccgcaccgatcgcccttcccaacagttgcgcagcctgaatggcgaatggcgcctgatgcggtattttctccttacgcatctgtgcggtatttcacaccgcatatggtgcactctcagtacaatctgctctgatgccgcatagttaagccagccccgacacccgccaacacccgctgacgcgccctgacgggcttgtctgctcccggcatccgcttacagacaagctgtgaccgtctccgggagctgcatgtgtcagaggttttcaccgtcatcaccgaaacgcgcga

SEQ ID NO: 53 - DNA, 8267 bp, Artificial Sequence
  Description of Artificial Sequence: Synthetic polynucleotide
tgcagctctggcccgtgtctcaaaatctctgatgttacattgcacaagataaaaatatatcatcatgaacaataaaactgtctgcttacataaacagtaatacaaggggtgttatgagccatattcaacgggaaacgtcgaggccgcgattaaattccaacatggatgctgatttatatgggtataaatgggctcgcgataatgtcgggcaatcaggtgcgacaatctatcgcttgtatgggaagcccgatgcgccagagttgtttctgaaacatggcaaaggtagcgttgccaatgatgttacagatgagatggtcagactaaactggctgacggaatttatgcctcttccgaccatcaagcattttatccgtactcctgatgatgcatggttactcaccactgcgatccccggaaaaacagcattccaggtattagaagaatatcctgattcaggtgaaaatattgttgatgcgctggcagtgttcctgcgccggttgcattcgattcctgtttgtaattgtccttttaacagcgatcgcgtatttcgtctcgctcaggcgcaatcacgaatgaataacggtttggttgatgcgagtgattttgatgacgagcgtaatggctggcctgttgaacaagtctggaaagaaatgcataaacttttgccattctcaccggattcagtcgtcactcatggtgatttctcacttgataaccttatttttgacgaggggaaattaataggttgtattgatgttggacgagtcggaatcgcagaccgataccaggatcttgccatcctatggaactgcctcggtgagttttctccttcattacagaaacggctttttcaaaaatatggtattgataatcctgatatgaataaattgcagtttcatttgatgctcgatgagtttttctaatcagaattggttaattggttgtaacattattcagattgggcttgatttaaaacttcatttttaatttaaaaggatctaggtgaagatcctttttgataatctcatgaccaaaatcccttaacgtgagttttcgttccactgagcgtcagaccccgtagaaaagatcaaaggatcttcttgagatcctttttttctgcgcgtaatctgctgcttgcaaacaaaaaaaccaccgctaccagcggtggtttgtttgccggatcaagagctaccaactctttttccgaaggtaactggcttcagcagagcgcagataccaaatactgttcttctagtgtagccgtagttaggccaccacttcaagaactctgtagcaccgcctacatacctcgctctgctaatcctgttaccagtggctgctgccagtggcgataagtcgtgtcttaccgggttggactcaagacgatagttaccggataaggcgcagcggtcgggctgaacggggggttcgtgcacacagcccagcttggagcgaacgacctacaccgaactgagatacctacagcgtgagctatgagaaagcgccacgcttcccgaagggagaaaggcggacaggtatccggtaagcggcagggtcggaacaggagagcgcacgagggagcttccagggggaaacgcctggtatctttatagtcctgtcgggtttcgccacctctgacttgagcgtcgatttttgtgatgctcgtcaggggggcggagcctatggaaaaacgccagcaacgcggcctttttacggttcctggccttttgctggccttttgctcacatgttctttcctgcgttatcccctgattctgtggataaccgtattaccgcctttgagtgagctgataccgctcgccgcagccgaacgaccgagcgcagcgagtcagtgagcgaggaagcggaagagcgcccaatacgcaaaccgcctctccccgcgcgttggccgattcattaatgcagctggcacgacaggtttcccgactggaaagcgggcagtgagcgcaacgcaattaatgtgagttagctcactcattaggcaccccaggctttacactttatgcttccggctcgtatgttgtgtggaattgtgagcggataacaatttcacacaggaaacagctatgaccatgattacaccaagcttgcatgcaggcctatccgtagatgtacctggacatccaggtgatgccggcggcggtggtggaggcgcgcggaaagtcgcggacgcggttccagatgttgcgcagcggcaaaaagtgctccatggtcgggacgctctggccggtgaggcgtgcgcagtcgttgacgctctagaccgtgcaaaaggagagcctgtaagcgggcactcttccgtggtctggtggataaattcgcaagggtatcatggcggacgaccggggttcgaaccccggatccggccgtccgccgtgatccatgcggttaccgcccgcgtgtcgaacccaggtgtgcgacgtcagacaacgggggagcgctccttttggcttccttccaggcgcggcggctgctgcgctagcttttttggccactggccgcgcgcggcgtaagcggttaggctggaaagcgaaagcattaagtggctcgctccctgtagccggagggttattttccaagggttgagtcgcaggacccccggttcgagtctcgggccggccggactgcggcgaacgggggtttgcctccccgtcatgcaagaccccgcttgcaaattcctccggaaacagggacgagccccttttttgcttttcccagatgcatccggtgctgcggcagatgcgcccccctcctcagcagcggcaagagcaagagcagcggcagacatgcagggcaccctccccttctcctaccgcgtcaggaggggcaacatctgtacactctcgggtgattatttacccccacccttgccgtctgcgccgtttaaaaatcaaaggggttctgccgcgcatcgctatgcgccactggcagggacacgttgcgatactggtgtttagtgctccacttaaactcaggcacaaccatccgcggcagctcggtgaagttttcactccacaggctgcgcaccatcaccaacgcgtttagcaggtcgggcgccgatatcttgaagtcgcagttggggcctccgccctgcgcgcgcgagttgcgatacacagggttgcagcactggaacactatcagcgccgggtggtgcacgctggccagcacgctcttgtcggagatcagatccgcgtccaggtcctccgcgttgctcagggcgaacggagtcaactttggtagctgccttcccaaaaagggcgcgtgcccaggctttgagttgcactcgcaccgtagtggcatcaaaaggtgaccgtgcccggtctgggcgttaggatacagcgcctgcataaaagccttgatctgcttaaaagccacctgagcctttgcgccttcagagaagaacatgccgcaagacttgccggaaaactgattggccggacaggccgcgtcgtgcacgcagcaccttgcgtcggtgttggagatctgcaccacatttcggccccaccggttcttcacgatcttggccttgctagactgctccttcagcgcgcgctgcccgttttcgctcgtcacatccatttcaatcacgtgctccttatttatcataatgcttccgtgtagacacttaagctcgccttcgatctcagcgcagcggtgcagccacaacgcgcagcccgtgggctcgtgatgcttgtaggtcacctctgcaaacgactgcaggtacgcctgcaggaatcgccccatcatcgtcacaaaggtcttgttgctggtgaaggtcagctgcaacccgcggtgctcctcgttcagccaggtcttgcatacggccgccagagcttccacttggtcaggcagtagtttgaagttcgcctttagatcgttatccacgtggtacttgtccatcagcgcgcgcgcagcctccatgcccttctcccacgcagacacgatcggcacactcagcgggttcatcaccgtaatttcactttccgcttcgctgggctcttcctcttcctcttgcgtccgcataccacgcgccactgggtcgtcttcattcagccgccgcactgtgcgcttacctcctttgccatgcttgattagcaccggtgggttgctgaaacccaccatttgtagcgccacatcttctctttcttcctcgctgtccacgattacctctggtgatggcgggcgctcgggcttgggagaagggcgcttctttttcttcttgggcgcaatggccaaatccgccgccgaggtcgatggccgcgggctgggtgtgcgcggcaccagcgcgtcttgtgatgagtcttcctcgtcctcggactcgatacgccgcctcatccgcttttttgggggcgcccggggaggcggcggcgacggggacggggacgacacgtcctccatggttgggggacgtcgcgccgcaccgcgtccgcgctcgggggtggtttcgcgctgctcctcttcccgactggccatttccttctcctataggcagaaaaagatccacaaaagcgaagatcagcttcggcgcacgctggaagacgcggaggctctcttcagtaaatactgcgcgctgactcttaaggactagtttcgcgccctttctcaaatttaagcgcgaaaactacgtcatctccagcggccacacccggcgccagcacctgttgtcagcgccattggcgcgcccgcccgccgcgcgcttcgctttttatagggccgccgccgccgccgcctcgccataaaaggaaactttcggagcgcgccgctctgattggctgccgccgcacctctccgcctcgccccgccccgcccctcgccccgccccgccccgcctggcgcgcgccccccccccccccccgcccccatcgctgcacaaaataattaaaaaataaataaatacaaaattgggggtggggaggggggggagatggggagagtgaagcagaacgtggggctcacctcgaggccggccgaatatcttcatttaaatgtttaaacatcgatgcggccgcaacttgtttattgcagcttataatggttacaaataaagcaatagcatcacaaatttcacaaataaagcatttttttcactgcattctagttgtggtttgtccaaactcatcaatgtatcttagcttaacgggcggcgaaggagaagtccacgcctacatgggggtagagtcataatcgtgcatcaggatagggcggtggtgctgcagcagcgcgcgaataaactgctgccgccgccgctccgtcctgcaggaatacaacatggcagtggtctcctcagcgatgattcgcaccgcccgcagcataaggcgccttgtcctccgggcacagcagcgcaccctgatctcacttaaatcagcacagtaactgcagcacagcaccacaatattgttcaaaatcccacagtgcaaggcgctgtatccaaagctcatggcggggaccacagaacccacgtggccatcataccacaagcgcaggtagattaagtggcgacccctcataaacacgctggacataaacattacctcttttggcatgttgtaattcaccacctcccggtaccatataaacctctgattaaacatggcgccatccaccaccatcctaaaccagctggccaaaacctgcccgccggctatacactgcagggaaccgggactggaacaatgacagtggagagcccaggactcgtaaccatggatcatcatgctcgtcatgatatcaatgttggcacaacacaggcacacgtgcatacacttcctcaggattacaagctcctcccgcgttagaaccatatcccagggaacaacccattcctgaatcagcgtaaatcccacactgcagggaagacctcgcacgtaactcacgttgtgcattgtcaaagtgttacattcgggcagcagcggatgatcctccagtatggtagcgcgggtttctgtctcaaaaggaggtagacgatccctactgtacggagtgcgccgagacaaccgagatcgtgttggtcgtagtgtcatgccaaatggaacgccggacgtagtcatatttcctgaagcaaaaccaggtgcgggcgtgacaaacagatctgcgtctccggtctcgccgcttagatcgctctgtgtagtagttgtagtatatccactctctcaaagcatccaggcgccccctggcttcgggttctatgtaaactccttcatgcgccgctgccctgataacatccaccaccgcagaataagccacacccagccaacctacacattcgttctgcgagtcacacacgggaggagcgggaagagctggaagaaccatgtttttttttttattccaaaagattatccaaaacctcaaaatgaagatctattaagtgaacgcgctcccctccggtggcgtggtcaaactctacagccaaagaacagataatggcatttgtaagatgttgcacaatggcttccaaaaggcaaacggccctcacgtccaagtggacgtaaaggctaaacccttcagggtgaatctcctctataaacattccagcaccttcaaccatgcccaaataattctcatctcgccaccttctcaatatatctctaagcaaatcccgaatattaagtccggccattgtaaaaatctgctccagagcgccctccaccttcagcctcaagcagcgaatcatgattgcaaaaattcaggttcctcacagacctgtataagattcaaaagcggaacattaacaaaaataccgcgatcccgtaggtcccttcgcagggccagctgaacataatcgtgcaggtctgcacggaccagcgcggccacttccccgccaggaaccatgacaaaagaacccacactgattatgacacgcatactcggagctatgctaaccagcgtagccccgatgtaagcttgttgcatgggcggcgatataaaatgcaaggtgctgctcaaaaaatcaggcaaagcctcgcgcaaaaaagaaagcacatcgtagtcatgctcatgcagataaaggcaggtaagctccggaaccaccacagaaaaagacaccatttttctctcaaacatgtctgcgggtttctgcataaacacaaaataaaataacaaaaaaacatttaaacattagaagcctgtcttacaacaggaaaaacaacccttataagcataagacggactacggccatgccggcgtgaccgtaaaaaaactggtcaccgtgattaaaaagcaccaccgacagctcctcggtcatgtccggagtcataatgtaagactcggtaaacacatcaggttgattcacatcggtcagtgctaaaaagcgaccgaaatagcccgggggaatacatacccgcaggcgtagagacaacattacagcccccataggaggtataacaaaattaataggagagaaaaacacataaacacctgaaaaaccctcctgcctaggcaaaatagcaccctcccgctccagaacaacatacagcgcttccacagcggcagccataacagtcagccttaccagtaaaaaagaaaacctattaaaaaaacaccactcgacacggcaccagctcaatcagtcacagtgtaaaaaagggccaagtgcagagcgagtatatataggactaaaaaatgacgtaacggttaaagtccacaaaaaacacccagaaaaccgcacgcgaacctacgcccagaaacgaaagccaaaaaacccacaacttcctcaaatcgtcacttccgttttcccacgttacgtcacttcccattttaagaaaactacaattcccaacacatacaagttactccgcccttaattaaatcggatccgatatctagatgtattcgcgaggtaccgagctcgaattctctggccgtcgttttacaacgtcgtgactgggaaaaccctggcgttacccaacttaatcgccttgcagcacatccccctttcgccagctggcgtaatagcgaagaggcccgcaccgatcgcccttcccaacagttgcgcagcctgaatggcgaatggcgcctgatgcggtattttctccttacgcatctgtgcggtatttcacaccgcatatggtgcactctcagtacaatctgctctgatgccgcatagttaagccagccccgacacccgccaacacccgctgacgcgccctgacgggcttgtctgctcccggcatccgcttacagacaagctgtgaccgtctccgggagctgcatgtgtcagaggttttcaccgtcatcaccgaaacgcgcga

SEQ ID NO: 54 - DNA, 9263 bp, Artificial Sequence
  Description of Artificial Sequence: Synthetic polynucleotide
tgcagctctggcccgtgtctcaaaatctctgatgttacattgcacaagataaaaatatatcatcatgaacaataaaactgtctgcttacataaacagtaatacaaggggtgttatgagccatattcaacgggaaacgtcgaggccgcgattaaattccaacatggatgctgatttatatgggtataaatgggctcgcgataatgtcgggcaatcaggtgcgacaatctatcgcttgtatgggaagcccgatgcgccagagttgtttctgaaacatggcaaaggtagcgttgccaatgatgttacagatgagatggtcagactaaactggctgacggaatttatgcctcttccgaccatcaagcattttatccgtactcctgatgatgcatggttactcaccactgcgatccccggaaaaacagcattccaggtattagaagaatatcctgattcaggtgaaaatattgttgatgcgctggcagtgttcctgcgccggttgcattcgattcctgtttgtaattgtccttttaacagcgatcgcgtatttcgtctcgctcaggcgcaatcacgaatgaataacggtttggttgatgcgagtgattttgatgacgagcgtaatggctggcctgttgaacaagtctggaaagaaatgcataaacttttgccattctcaccggattcagtcgtcactcatggtgatttctcacttgataaccttatttttgacgaggggaaattaataggttgtattgatgttggacgagtcggaatcgcagaccgataccaggatcttgccatcctatggaactgcctcggtgagttttctccttcattacagaaacggctttttcaaaaatatggtattgataatcctgatatgaataaattgcagtttcatttgatgctcgatgagtttttctaatcagaattggttaattggttgtaacattattcagattgggcttgatttaaaacttcatttttaatttaaaaggatctaggtgaagatcctttttgataatctcatgaccaaaatcccttaacgtgagttttcgttccactgagcgtcagaccccgtagaaaagatcaaaggatcttcttgagatcctttttttctgcgcgtaatctgctgcttgcaaacaaaaaaaccaccgctaccagcggtggtttgtttgccggatcaagagctaccaactctttttccgaaggtaactggcttcagcagagcgcagataccaaatactgttcttctagtgtagccgtagttaggccaccacttcaagaactctgtagcaccgcctacatacctcgctctgctaatcctgttaccagtggctgctgccagtggcgataagtcgtgtcttaccgggttggactcaagacgatagttaccggataaggcgcagcggtcgggctgaacggggggttcgtgcacacagcccagcttggagcgaacgacctacaccgaactgagatacctacagcgtgagctatgagaaagcgccacgcttcccgaagggagaaaggcggacaggtatccggtaagcggcagggtcggaacaggagagcgcacgagggagcttccagggggaaacgcctggtatctttatagtcctgtcgggtttcgccacctctgacttgagcgtcgatttttgtgatgctcgtcaggggggcggagcctatggaaaaacgccagcaacgcggcctttttacggttcctggccttttgctggccttttgctcacatgttctttcctgcgttatcccctgattctgtggataaccgtattaccgcctttgagtgagctgataccgctcgccgcagccgaacgaccgagcgcagcgagtcagtgagcgaggaagcggaagagcgcccaatacgcaaaccgcctctccccgcgcgttggccgattcattaatgcagctggcacgacaggtttcccgactggaaagcgggcagtgagcgcaacgcaattaatgtgagttagctcactcattaggcaccccaggctttacactttatgcttccggctcgtatgttgtgtggaattgtgagcggataacaatttcacacaggaaacagctatgaccatgattacaccaagcttgcatgcaggcctctgcagtcgaccagaagcaccatgtccttgggtccggcctgctgaatgcgcaggcggtcggccatgccccaggcttcgttttgacatcggcgcaggtctttgtagtagtcttgcatgagcctttctaccggcacttcttcttctccttcctcttgtcctgcatctcttgcatctatcgctgcggcggcggcggagtttggccgtaggtggcgccctcttcctcccatgcgtgtgaccccgaagcccctcatcggctgaagcagggctaggtcggcgacaacgcgctcggctaatatggcctgctgcacctgcgtgagggtagactggaagtcatccatgtccacaaagcggtggtatgcgcccgtgttgatggtgtaagtgcagttggccataacggaccagttaacggtctggtgacccggctgcgagagctcggtgtacctgagacgcgagtaagccctcgagtcaaatacgtagtcgttgcaagtccgcaccaggtactggtatcccaccaaaaagtgcggcggcggctggcggtagaggggccagcgtagggtggccggggctccgggggcgagatcttccaacataaggcgatgatatccgtagatgtacctggacatccaggtgatgccggcggcggtggtggaggcgcgcggaaagtcgcggacgcggttccagatgttgcgcagcggcaaaaagtgctccatggtcgggacgctctggccggtcaggcgcgcgcaatcgttgacgctctagcgtgcaaaaggagagcctgtaagcgggcactcttccgtggtctggtggataaattcgcaagggtatcatggcggacgaccggggttcgagccccgtatccggccgtccgccgtgatccatgcggttaccgcccgcgtgtcgaacccaggtgtgcgacgtcagacaacgggggagtgctccttttggcttccttccaggcgcggcggctgctgcgctagcttttttggccactggccgcgcgcagcgtaagcggttaggctggaaagcgaaagcattaagtggctcgctccctgtagccggagggttattttccaagggttgagtcgcgggacccccggttcgagtctcggaccgagactgggggcgtacactggatggcctttgcctggaacccgcactcaaaaacatgctacctctttgagccctttggcttttctgaccagcgactcaagcaggtttaccagtttgagtacgagtcactcctgcgccgtagcgccattgcttcttcccccgaccgctgtataacgctggaaaagtccacccaaagcgtacaggggcccaactcggccgcctgtggactattctgctgcatgtttctccacgcctttgccaactggccccaaactcccatggatcacaaccccaccatgaaccttattaccggggtacccaactccatgctcaacagtccccaggtacagcccaccctgcgtcgcaaccaggaacagctctacagcttcctggagcgccactcgccctacttccgcagccacagtgcgcagattaggagcgccacttctttttgtcacttgaaaaacatgtaaaaataatgtactagagacactttcaataaaggcaaatgcttttatttgtacactctcgggtgattatttacccccacccttgccgtctgcgccgtttaaaaatcaaaggggttctgccgcgcatcgctatgcgccactggcagggacacgttgcgatactggtgtttagtgctccacttaaactcaggcacaaccatccgcggcagctcggtgaagttttcactccacaggctgcgcaccatcaccaacgcgtttagcaggtcgggcgccgatatcttgaagtcgcagttggggcctccgccctgcgcgcgcgagttgcgatacacagggttgcagcactggaacactatcagcgccgggtggtgcacgctggccagcacgctcttgtcggagatcagatccgcgtccaggtcctccgcgttgctcagggcgaacggagtcaactttggtagctgccttcccaaaaagggcgcgtgcccaggctttgagttgcactcgcaccgtagtggcatcaaaaggtgaccgtgcccggtctgggcgttaggatacagcgcctgcataaaagccttgatctgcttaaaagccacctgagcctttgcgccttcagagaagaacatgccgcaagacttgccggaaaactgattggccggacaggccgcgtcgtgcacgcagcaccttgcgtcggtgttggagatctgcaccacatttcggccccaccggttcttcacgatcttggccttgctagactgctccttcagcgcgcgctgcccgttttcgctcgtcacatccatttcaatcacgtgctccttatttatcataatgcttccgtgtagacacttaagctcgccttcgatctcagcgcagcggtgcagccacaacgcgcagcccgtgggctcgtgatgcttgtaggtcacctctgcaaacgactgcaggtacgcctgcaggaatcgccccatcatcgtcacaaaggtcttgttgctggtgaaggtcagctgcaacccgcggtgctcctcgttcagccaggtcttgcatacggccgccagagcttccacttggtcaggcagtagtttgaagttcgcctttagatcgttatccacgtggtacttgtccatcagcgcgcgcgcagcctccatgcccttctcccacgcagacacgatcggcacactcagcgggttcatcaccgtaatttcactttccgcttcgctgggctcttcctcttcctcttgcgtccgcataccacgcgccactgggtcgtcttcattcagccgccgcactgtgcgcttacctcctttgccatgcttgattagcaccggtgggttgctgaaacccaccatttgtagcgccacatcttctctttcttcctcgctgtccacgattacctctggtgatggcgggcgctcgggcttgggagaagggcgcttctttttcttcttgggcgcaatggccaaatccgccgccgaggtcgatggccgcgggctgggtgtgcgcggcaccagcgcgtcttgtgatgagtcttcctcgtcctcggactcgatacgccgcctcatccgcttttttgggggcgcccggggaggcggcggcgacggggacggggacgacacgtcctccatggttgggggacgtcgcgccgcaccgcgtccgcgctcgggggtggtttcgcgctgctcctcttcccgactggccatttccttctcctataggcagaaaaagatccacaaaagcgaagatcagcttcggcgcacgctggaagacgcggaggctctcttcagtaaatactgcgcgctgactcttaaggactagtttcgcgccctttctcaaatttaagcgcgaaaactacgtcatctccagcggccacacccggcgccagcacctgttgtcagcgccattggcgcgcccgcccgccgcgcgcttcgctttttatagggccgccgccgccgccgcctcgccataaaaggaaactttcggagcgcgccgctctgattggctgccgccgcacctctccgcctcgccccgccccgcccctcgccccgccccgccccgcctggcgcgcgccccccccccccccccgcccccatcgctgcacaaaataattaaaaaataaataaatacaaaattgggggtggggaggggggggagatggggagagtgaagcagaacgtggggctcacctcgaggccggccgaatatcttcatttaaatgtttaaacatcgatgcggccgcaacttgtttattgcagcttataatggttacaaataaagcaatagcatcacaaatttcacaaataaagcatttttttcactgcattctagttgtggtttgtccaaactcatcaatgtatcttagcttaacgggcggcgaaggagaagtccacgcctacatgggggtagagtcataatcgtgcatcaggatagggcggtggtgctgcagcagcgcgcgaataaactgctgccgccgccgctccgtcctgcaggaatacaacatggcagtggtctcctcagcgatgattcgcaccgcccgcagcataaggcgccttgtcctccgggcacagcagcgcaccctgatctcacttaaatcagcacagtaactgcagcacagcaccacaatattgttcaaaatcccacagtgcaaggcgctgtatccaaagctcatggcggggaccacagaacccacgtggccatcataccacaagcgcaggtagattaagtggcgacccctcataaacacgctggacataaacattacctcttttggcatgttgtaattcaccacctcccggtaccatataaacctctgattaaacatggcgccatccaccaccatcctaaaccagctggccaaaacctgcccgccggctatacactgcagggaaccgggactggaacaatgacagtggagagcccaggactcgtaaccatggatcatcatgctcgtcatgatatcaatgttggcacaacacaggcacacgtgcatacacttcctcaggattacaagctcctcccgcgttagaaccatatcccagggaacaacccattcctgaatcagcgtaaatcccacactgcagggaagacctcgcacgtaactcacgttgtgcattgtcaaagtgttacattcgggcagcagcggatgatcctccagtatggtagcgcgggtttctgtctcaaaaggaggtagacgatccctactgtacggagtgcgccgagacaaccgagatcgtgttggtcgtagtgtcatgccaaatggaacgccggacgtagtcatatttcctgaagcaaaaccaggtgcgggcgtgacaaacagatctgcgtctccggtctcgccgcttagatcgctctgtgtagtagttgtagtatatccactctctcaaagcatccaggcgccccctggcttcgggttctatgtaaactccttcatgcgccgctgccctgataacatccaccaccgcagaataagccacacccagccaacctacacattcgttctgcgagtcacacacgggaggagcgggaagagctggaagaaccatgtttttttttttattccaaaagattatccaaaacctcaaaatgaagatctattaagtgaacgcgctcccctccggtggcgtggtcaaactctacagccaaagaacagataatggcatttgtaagatgttgcacaatggcttccaaaaggcaaacggccctcacgtccaagtggacgtaaaggctaaacccttcagggtgaatctcctctataaacattccagcaccttcaaccatgcccaaataattctcatctcgccaccttctcaatatatctctaagcaaatcccgaatattaagtccggccattgtaaaaatctgctccagagcgccctccaccttcagcctcaagcagcgaatcatgattgcaaaaattcaggttcctcacagacctgtataagattcaaaagcggaacattaacaaaaataccgcgatcccgtaggtcccttcgcagggccagctgaacataatcgtgcaggtctgcacggaccagcgcggccacttccccgccaggaaccatgacaaaagaacccacactgattatgacacgcatactcggagctatgctaaccagcgtagccccgatgtaagcttgttgcatgggcggcgatataaaatgcaaggtgctgctcaaaaaatcaggcaaagcctcgcgcaaaaaagaaagcacatcgtagtcatgctcatgcagataaaggcaggtaagctccggaaccaccacagaaaaagacaccatttttctctcaaacatgtctgcgggtttctgcataaacacaaaataaaataacaaaaaaacatttaaacattagaagcctgtcttacaacaggaaaaacaacccttataagcataagacggactacggccatgccggcgtgaccgtaaaaaaactggtcaccgtgattaaaaagcaccaccgacagctcctcggtcatgtccggagtcataatgtaagactcggtaaacacatcaggttgattcacatcggtcagtgctaaaaagcgaccgaaatagcccgggggaatacatacccgcaggcgtagagacaacattacagcccccataggaggtataacaaaattaataggagagaaaaacacataaacacctgaaaaaccctcctgcctaggcaaaatagcaccctcccgctccagaacaacatacagcgcttccacagcggcagccatggtggcatttgcaaaagcctaggcctccaaaaaagcctcctcactacttctggaatagctcagaggccgaggcggcctcggcctctgcataaataaaaaaaattagtcagccatggggcggagaatgggcggaactgggcggagttaggggcgggatgggcggagttaggggcgggactatggttgctgactaattgagatgcatgctttgcatacttctgcctgctggggagcctggggactttccacacctggttgctgactaattgagatgcatgctttgcatacttctgcctgctggggagcctggggactttccacaccctaactgacacacacgttacgtcacttcccattttaagaaaactacaattcccaacacatacaagttactccgcccttaattaaatcggatccgatatctagatgtattcgcgaggtaccgagctcgaattctctggccgtcgttttacaacgtcgtgactgggaaaaccctggcgttacccaacttaatcgccttgcagcacatccccctttcgccagctggcgtaatagcgaagaggcccgcaccgatcgcccttcccaacagttgcgcagcctgaatggcgaatggcgcctgatgcggtattttctccttacgcatctgtgcggtatttcacaccgcatatggtgcactctcagtacaatctgctctgatgccgcatagttaagccagccccgacacccgccaacacccgctgacgcgccctgacgggcttgtctgctcccggcatccgcttacagacaagctgtgaccgtctccgggagctgcatgtgtcagaggttttcaccgtcatcaccgaaacgcgcga

SEQ ID NO: 55 - DNA, 8499 bp, Artificial Sequence
  Description of Artificial Sequence: Synthetic polynucleotide
tgcagctctggcccgtgtctcaaaatctctgatgttacattgcacaagataaaaatatatcatcatgaacaataaaactgtctgcttacataaacagtaatacaaggggtgttatgagccatattcaacgggaaacgtcgaggccgcgattaaattccaacatggatgctgatttatatgggtataaatgggctcgcgataatgtcgggcaatcaggtgcgacaatctatcgcttgtatgggaagcccgatgcgccagagttgtttctgaaacatggcaaaggtagcgttgccaatgatgttacagatgagatggtcagactaaactggctgacggaatttatgcctcttccgaccatcaagcattttatccgtactcctgatgatgcatggttactcaccactgcgatccccggaaaaacagcattccaggtattagaagaatatcctgattcaggtgaaaatattgttgatgcgctggcagtgttcctgcgccggttgcattcgattcctgtttgtaattgtccttttaacagcgatcgcgtatttcgtctcgctcaggcgcaatcacgaatgaataacggtttggttgatgcgagtgattttgatgacgagcgtaatggctggcctgttgaacaagtctggaaagaaatgcataaacttttgccattctcaccggattcagtcgtcactcatggtgatttctcacttgataaccttatttttgacgaggggaaattaataggttgtattgatgttggacgagtcggaatcgcagaccgataccaggatcttgccatcctatggaactgcctcggtgagttttctccttcattacagaaacggctttttcaaaaatatggtattgataatcctgatatgaataaattgcagtttcatttgatgctcgatgagtttttctaatcagaattggttaattggttgtaacattattcagattgggcttgatttaaaacttcatttttaatttaaaaggatctaggtgaagatcctttttgataatctcatgaccaaaatcccttaacgtgagttttcgttccactgagcgtcagaccccgtagaaaagatcaaaggatcttcttgagatcctttttttctgcgcgtaatctgctgcttgcaaacaaaaaaaccaccgctaccagcggtggtttgtttgccggatcaagagctaccaactctttttccgaaggtaactggcttcagcagagcgcagataccaaatactgttcttctagtgtagccgtagttaggccaccacttcaagaactctgtagcaccgcctacatacctcgctctgctaatcctgttaccagtggctgctgccagtggcgataagtcgtgtcttaccgggttggactcaagacgatagttaccggataaggcgcagcggtcgggctgaacggggggttcgtgcacacagcccagcttggagcgaacgacctacaccgaactgagatacctacagcgtgagctatgagaaagcgccacgcttcccgaagggagaaaggcggacaggtatccggtaagcggcagggtcggaacaggagagcgcacgagggagcttccagggggaaacgcctggtatctttatagtcctgtcgggtttcgccacctctgacttgagcgtcgatttttgtgatgctcgtcaggggggcggagcctatggaaaaacgccagcaacgcggcctttttacggttcctggccttttgctggccttttgctcacatgttctttcctgcgttatcccctgattctgtggataaccgtattaccgcctttgagtgagctgataccgctcgccgcagccgaacgaccgagcgcagcgagtcagtgagcgaggaagcggaagagcgcccaatacgcaaaccgcctctccccgcgcgttggccgattcattaatgcagctggcacgacaggtttcccgactggaaagcgggcagtgagcgcaacgcaattaatgtgagttagctcactcattaggcaccccaggctttacactttatgcttccggctcgtatgttgtgtggaattgtgagcggataacaatttcacacaggaaacagctatgaccatgattacaccaagcttgcatgcaggcctatccgtagatgtacctggacatccaggtgatgccggcggcggtggtggaggcgcgcggaaagtcgcggacgcggttccagatgttgcgcagcggcaaaaagtgctccatggtcgggacgctctggccggtgaggcgtgcgcagtcgttgacgctctagaccgtgcaaaaggagagcctgtaagcgggcactcttccgtggtctggtggataaattcgcaagggtatcatggcggacgaccggggttcgaaccccggatccggccgtccgccgtgatccatgcggttaccgcccgcgtgtcgaacccaggtgtgcgacgtcagacaacgggggagcgctccttttggcttccttccaggcgcggcggctgctgcgctagcttttttggccactggccgcgcgcggcgtaagcggttaggctggaaagcgaaagcattaagtggctcgctccctgtagccggagggttattttccaagggttgagtcgcaggacccccggttcgagtctcgggccggccggactgcggcgaacgggggtttgcctccccgtcatgcaagaccccgcttgcaaattcctccggaaacagggacgagccccttttttgcttttcccagatgcatccggtgctgcggcagatgcgcccccctcctcagcagcggcaagagcaagagcagcggcagacatgcagggcaccctccccttctcctaccgcgtcaggaggggcaacatcgatccagacatgataagatacattgatgagtttggacaaaccacaactagaatgcagtgaaaaaaatgctttatttgtgaaatttgtgatgctattgctttatttgtaaccattataagctgcaataaacaagtttgtacactctcgggtgattatttacccccacccttgccgtctgcgccgtttaaaaatcaaaggggttctgccgcgcatcgctatgcgccactggcagggacacgttgcgatactggtgtttagtgctccacttaaactcaggcacaaccatccgcggcagctcggtgaagttttcactccacaggctgcgcaccatcaccaacgcgtttagcaggtcgggcgccgatatcttgaagtcgcagttggggcctccgccctgcgcgcgcgagttgcgatacacagggttgcagcactggaacactatcagcgccgggtggtgcacgctggccagcacgctcttgtcggagatcagatccgcgtccaggtcctccgcgttgctcagggcgaacggagtcaactttggtagctgccttcccaaaaagggcgcgtgcccaggctttgagttgcactcgcaccgtagtggcatcaaaaggtgaccgtgcccggtctgggcgttaggatacagcgcctgcataaaagccttgatctgcttaaaagccacctgagcctttgcgccttcagagaagaacatgccgcaagacttgccggaaaactgattggccggacaggccgcgtcgtgcacgcagcaccttgcgtcggtgttggagatctgcaccacatttcggccccaccggttcttcacgatcttggccttgctagactgctccttcagcgcgcgctgcccgttttcgctcgtcacatccatttcaatcacgtgctccttatttatcataatgcttccgtgtagacacttaagctcgccttcgatctcagcgcagcggtgcagccacaacgcgcagcccgtgggctcgtgatgcttgtaggtcacctctgcaaacgactgcaggtacgcctgcaggaatcgccccatcatcgtcacaaaggtcttgttgctggtgaaggtcagctgcaacccgcggtgctcctcgttcagccaggtcttgcatacggccgccagagcttccacttggtcaggcagtagtttgaagttcgcctttagatcgttatccacgtggtacttgtccatcagcgcgcgcgcagcctccatgcccttctcccacgcagacacgatcggcacactcagcgggttcatcaccgtaatttcactttccgcttcgctgggctcttcctcttcctcttgcgtccgcataccacgcgccactgggtcgtcttcattcagccgccgcactgtgcgcttacctcctttgccatgcttgattagcaccggtgggttgctgaaacccaccatttgtagcgccacatcttctctttcttcctcgctgtccacgattacctctggtgatggcgggcgctcgggcttgggagaagggcgcttctttttcttcttgggcgcaatggccaaatccgccgccgaggtcgatggccgcgggctgggtgtgcgcggcaccagcgcgtcttgtgatgagtcttcctcgtcctcggactcgatacgccgcctcatccgcttttttgggggcgcccggggaggcggcggcgacggggacggggacgacacgtcctccatggttgggggacgtcgcgccgcaccgcgtccgcgctcgggggtggtttcgcgctgctcctcttcccgactggccatttccttctcctataggcagaaaaagatccacaaaagcgaagatcagcttcggcgcacgctggaagacgcggaggctctcttcagtaaatactgcgcgctgactcttaaggactagtttcgcgccctttctcaaatttaagcgcgaaaactacgtcatctccagcggccacacccggcgccagcacctgttgtcagcgccattggcgcgcccgcccgccgcgcgcttcgctttttatagggccgccgccgccgccgcctcgccataaaaggaaactttcggagcgcgccgctctgattggctgccgccgcacctctccgcctcgccccgccccgcccctcgccccgccccgccccgcctggcgcgcgccccccccccccccccgcccccatcgctgcacaaaataattaaaaaataaataaatacaaaattgggggtggggaggggggggagatggggagagtgaagcagaacgtggggctcacctcgaggccggccgaatatcttcatttaaatgtttaaacatcgatgcggccgcaacttgtttattgcagcttataatggttacaaataaagcaatagcatcacaaatttcacaaataaagcatttttttcactgcattctagttgtggtttgtccaaactcatcaatgtatcttagcttaacgggcggcgaaggagaagtccacgcctacatgggggtagagtcataatcgtgcatcaggatagggcggtggtgctgcagcagcgcgcgaataaactgctgccgccgccgctccgtcctgcaggaatacaacatggcagtggtctcctcagcgatgattcgcaccgcccgcagcataaggcgccttgtcctccgggcacagcagcgcaccctgatctcacttaaatcagcacagtaactgcagcacagcaccacaatattgttcaaaatcccacagtgcaaggcgctgtatccaaagctcatggcggggaccacagaacccacgtggccatcataccacaagcgcaggtagattaagtggcgacccctcataaacacgctggacataaacattacctcttttggcatgttgtaattcaccacctcccggtaccatataaacctctgattaaacatggcgccatccaccaccatcctaaaccagctggccaaaacctgcccgccggctatacactgcagggaaccgggactggaacaatgacagtggagagcccaggactcgtaaccatggatcatcatgctcgtcatgatatcaatgttggcacaacacaggcacacgtgcatacacttcctcaggattacaagctcctcccgcgttagaaccatatcccagggaacaacccattcctgaatcagcgtaaatcccacactgcagggaagacctcgcacgtaactcacgttgtgcattgtcaaagtgttacattcgggcagcagcggatgatcctccagtatggtagcgcgggtttctgtctcaaaaggaggtagacgatccctactgtacggagtgcgccgagacaaccgagatcgtgttggtcgtagtgtcatgccaaatggaacgccggacgtagtcatatttcctgaagcaaaaccaggtgcgggcgtgacaaacagatctgcgtctccggtctcgccgcttagatcgctctgtgtagtagttgtagtatatccactctctcaaagcatccaggcgccccctggcttcgggttctatgtaaactccttcatgcgccgctgccctgataacatccaccaccgcagaataagccacacccagccaacctacacattcgttctgcgagtcacacacgggaggagcgggaagagctggaagaaccatgtttttttttttattccaaaagattatccaaaacctcaaaatgaagatctattaagtgaacgcgctcccctccggtggcgtggtcaaactctacagccaaagaacagataatggcatttgtaagatgttgcacaatggcttccaaaaggcaaacggccctcacgtccaagtggacgtaaaggctaaacccttcagggtgaatctcctctataaacattccagcaccttcaaccatgcccaaataattctcatctcgccaccttctcaatatatctctaagcaaatcccgaatattaagtccggccattgtaaaaatctgctccagagcgccctccaccttcagcctcaagcagcgaatcatgattgcaaaaattcaggttcctcacagacctgtataagattcaaaagcggaacattaacaaaaataccgcgatcccgtaggtcccttcgcagggccagctgaacataatcgtgcaggtctgcacggaccagcgcggccacttccccgccaggaaccatgacaaaagaacccacactgattatgacacgcatactcggagctatgctaaccagcgtagccccgatgtaagcttgttgcatgggcggcgatataaaatgcaaggtgctgctcaaaaaatcaggcaaagcctcgcgcaaaaaagaaagcacatcgtagtcatgctcatgcagataaaggcaggtaagctccggaaccaccacagaaaaagacaccatttttctctcaaacatgtctgcgggtttctgcataaacacaaaataaaataacaaaaaaacatttaaacattagaagcctgtcttacaacaggaaaaacaacccttataagcataagacggactacggccatgccggcgtgaccgtaaaaaaactggtcaccgtgattaaaaagcaccaccgacagctcctcggtcatgtccggagtcataatgtaagactcggtaaacacatcaggttgattcacatcggtcagtgctaaaaagcgaccgaaatagcccgggggaatacatacccgcaggcgtagagacaacattacagcccccataggaggtataacaaaattaataggagagaaaaacacataaacacctgaaaaaccctcctgcctaggcaaaatagcaccctcccgctccagaacaacatacagcgcttccacagcggcagccatggtggcatttgcaaaagcctaggcctccaaaaaagcctcctcactacttctggaatagctcagaggccgaggcggcctcggcctctgcataaataaaaaaaattagtcagccatggggcggagaatgggcggaactgggcggagttaggggcgggatgggcggagttaggggcgggactatggttgctgactaattgagatgcatgctttgcatacttctgcctgctggggagcctggggactttccacacctggttgctgactaattgagatgcatgctttgcatacttctgcctgctggggagcctggggactttccacaccctaactgacacacacgttacgtcacttcccattttaagaaaactacaattcccaacacatacaagttactccgcccttaattaaatcggatccgatatctagatgtattcgcgaggtaccgagctcgaattctctggccgtcgttttacaacgtcgtgactgggaaaaccctggcgttacccaacttaatcgccttgcagcacatccccctttcgccagctggcgtaatagcgaagaggcccgcaccgatcgcccttcccaacagttgcgcagcctgaatggcgaatggcgcctgatgcggtattttctccttacgcatctgtgcggtatttcacaccgcatatggtgcactctcagtacaatctgctctgatgccgcatagttaagccagccccgacacccgccaacacccgctgacgcgccctgacgggcttgtctgctcccggcatccgcttacagacaagctgtgaccgtctccgggagctgcatgtgtcagaggttttcaccgtcatcaccgaaacgcgcga

SEQ ID NO: 56 - DNA, 7315 bp, Artificial Sequence
  Description of Artificial Sequence: Synthetic polynucleotide
tgcagctctggcccgtgtctcaaaatctctgatgttacattgcacaagataaaaatatatcatcatgaacaataaaactgtctgcttacataaacagtaatacaaggggtgttatgagccatattcaacgggaaacgtcgaggccgcgattaaattccaacatggatgctgatttatatgggtataaatgggctcgcgataatgtcgggcaatcaggtgcgacaatctatcgcttgtatgggaagcccgatgcgccagagttgtttctgaaacatggcaaaggtagcgttgccaatgatgttacagatgagatggtcagactaaactggctgacggaatttatgcctcttccgaccatcaagcattttatccgtactcctgatgatgcatggttactcaccactgcgatccccggaaaaacagcattccaggtattagaagaatatcctgattcaggtgaaaatattgttgatgcgctggcagtgttcctgcgccggttgcattcgattcctgtttgtaattgtccttttaacagcgatcgcgtatttcgtctcgctcaggcgcaatcacgaatgaataacggtttggttgatgcgagtgattttgatgacgagcgtaatggctggcctgttgaacaagtctggaaagaaatgcataaacttttgccattctcaccggattcagtcgtcactcatggtgatttctcacttgataaccttatttttgacgaggggaaattaataggttgtattgatgttggacgagtcggaatcgcagaccgataccaggatcttgccatcctatggaactgcctcggtgagttttctccttcattacagaaacggctttttcaaaaatatggtattgataatcctgatatgaataaattgcagtttcatttgatgctcgatgagtttttctaatcagaattggttaattggttgtaacattattcagattgggcttgatttaaaacttcatttttaatttaaaaggatctaggtgaagatcctttttgataatctcatgaccaaaatcccttaacgtgagttttcgttccactgagcgtcagaccccgtagaaaagatcaaaggatcttcttgagatcctttttttctgcgcgtaatctgctgcttgcaaacaaaaaaaccaccgctaccagcggtggtttgtttgccggatcaagagctaccaactctttttccgaaggtaactggcttcagcagagcgcagataccaaatactgttcttctagtgtagccgtagttaggccaccacttcaagaactctgtagcaccgcctacatacctcgctctgctaatcctgttaccagtggctgctgccagtggcgataagtcgtgtcttaccgggttggactcaagacgatagttaccggataaggcgcagcggtcgggctgaacggggggttcgtgcacacagcccagcttggagcgaacgacctacaccgaactgagatacctacagcgtgagctatgagaaagcgccacgcttcccgaagggagaaaggcggacaggtatccggtaagcggcagggtcggaacaggagagcgcacgagggagcttccagggggaaacgcctggtatctttatagtcctgtcgggtttcgccacctctgacttgagcgtcgatttttgtgatgctcgtcaggggggcggagcctatggaaaaacgccagcaacgcggcctttttacggttcctggccttttgctggccttttgctcacatgttctttcctgcgttatcccctgattctgtggataaccgtattaccgcctttgagtgagctgataccgctcgccgcagccgaacgaccgagcgcagcgagtcagtgagcgaggaagcggaagagcgcccaatacgcaaaccgcctctccccgcgcgttggccgattcattaatgcagctggcacgacaggtttcccgactggaaagcgggcagtgagcgcaacgcaattaatgtgagttagctcactcattaggcaccccaggctttacactttatgcttccggctcgtatgttgtgtggaattgtgagcggataacaatttcacacaggaaacagctatgaccatgattacaccaagcttgcatgcaggcctatccgtagatgtacctggacatccaggtgatgccggcggcggtggtggaggcgcgcggaaagtcgcggacgcggttccagatgttgcgcagcggcaaaaagtgctccatggtcgggacgctctggccggtgaggcgtgcgcagtcgttgacgctctagaccgtgcaaaaggagagcctgtaagcgggcactcttccgtggtctggtggataaattcgcaagggtatcatggcggacgaccggggttcgaaccccggatccggccgtccgccgtgatccatgcggttaccgcccgcgtgtcgaacccaggtgtgcgacgtcagacaacgggggagcgctccttttggcttccttccaggcgcggcggctgctgcgctagcttttttggccactggccgcgcgcggcgtaagcggttaggctggaaagcgaaagcattaagtggctcgctccctgtagccggagggttattttccaagggttgagtcgcaggacccccggttcgagtctcgggccggccggactgcggcgaacgggggtttgcctccccgtcatgcaagaccccgcttgcaaattcctccggaaacagggacgagccccttttttgcttttcccagatgcatccggtgctgcggcagatgcgcccccctcctcagcagcggcaagagcaagagcagcggcagacatgcagggcaccctccccttctcctaccgcgtcaggaggggcaacatcgatccagacatgataagatacattgatgagtttggacaaaccacaactagaatgcagtgaaaaaaatgctttatttgtgaaatttgtgatgctattgctttatttgtaaccattataagctgcaataaacaagtttgtacactctcgggtgattatttacccccacccttgccgtctgcgccgtttaaaaatcaaaggggttctgccgcgcatcgctatgcgccactggcagggacacgttgcgatactggtgtttagtgctccacttaaactcaggcacaaccatccgcggcagctcggtgaagttttcactccacaggctgcgcaccatcaccaacgcgtttagcaggtcgggcgccgatatcttgaagtcgcagttggggcctccgccctgcgcgcgcgagttgcgatacacagggttgcagcactggaacactatcagcgccgggtggtgcacgctggccagcacgctcttgtcggagatcagatccgcgtccaggtcctccgcgttgctcagggcgaacggagtcaactttggtagctgccttcccaaaaagggcgcgtgcccaggctttgagttgcactcgcaccgtagtggcatcaaaaggtgaccgtgcccggtctgggcgttaggatacagcgcctgcataaaagccttgatctgcttaaaagccacctgagcctttgcgccttcagagaagaacatgccgcaagacttgccggaaaactgattggccggacaggccgcgtcgtgcacgcagcaccttgcgtcggtgttggagatctgcaccacatttcggccccaccggttcttcacgatcttggccttgctagactgctccttcagcgcgcgctgcccgttttcgctcgtcacatccatttcaatcacgtgctccttatttatcataatgcttccgtgtagacacttaagctcgccttcgatctcagcgcagcggtgcagccacaacgcgcagcccgtgggctcgtgatgcttgtaggtcacctctgcaaacgactgcaggtacgcctgcaggaatcgccccatcatcgtcacaaaggtcttgttgctggtgaaggtcagctgcaacccgcggtgctcctcgttcagccaggtcttgcatacggccgccagagcttccacttggtcaggcagtagtttgaagttcgcctttagatcgttatccacgtggtacttgtccatcagcgcgcgcgcagcctccatgcccttctcccacgcagacacgatcggcacactcagcgggttcatcaccgtaatttcactttccgcttcgctgggctcttcctcttcctcttgcgtccgcataccacgcgccactgggtcgtcttcattcagccgccgcactgtgcgcttacctcctttgccatgcttgattagcaccggtgggttgctgaaacccaccatttgtagcgccacatcttctctttcttcctcgctgtccacgattacctctggtgatggcgggcgctcgggcttgggagaagggcgcttctttttcttcttgggcgcaatggccaaatccgccgccgaggtcgatggccgcgggctgggtgtgcgcggcaccagcgcgtcttgtgatgagtcttcctcgtcctcggactcgatacgccgcctcatccgcttttttgggggcgcccggggaggcggcggcgacggggacggggacgacacgtcctccatggttgggggacgtcgcgccgcaccgcgtccgcgctcgggggtggtttcgcgctgctcctcttcccgactggccatttccttctcctataggcagaaaaagatccacaaaagcgaagatcagcttcggcgcacgctggaagacgcggaggctctcttcagtaaatactgcgcgctgactcttaaggactagtttcgcgccctttctcaaatttaagcgcgaaaactacgtcatctccagcggccacacccggcgccagcacctgttgtcagcgccattggcgcgcccgcccgccgcgcgcttcgctttttatagggccgccgccgccgccgcctcgccataaaaggaaactttcggagcgcgccgctctgattggctgccgccgcacctctccgcctcgccccgccccgcccctcgccccgccccgccccgcctggcgcgcgccccccccccccccccgcccccatcgctgcacaaaataattaaaaaataaataaatacaaaattgggggtggggaggggggggagatggggagagtgaagcagaacgtggggctcacctcgaggccggccgaatatcttcatttaaatgtttaaacatcgatgcggccgcaacttgtttattgcagcttataatggttacaaataaagcaatagcatcacaaatttcacaaataaagcatttttttcactgcattctagttgtggtttgtccaaactcatcaatgtatcttagcttaacgggcggcgaaggagaagtccacgcctacatgggggtagagtcataatcgtgcatcaggatagggcggtggtgctgcagcagcgcgcgaataaactgctgccgccgccgctccgtcctgcaggaatacaacatggcagtggtctcctcagcgatgattcgcaccgcccgcagcataaggcgccttgtcctccgggcacagcagcgcaccctgatctcacttaaatcagcacagtaactgcagcacagcaccacaatattgttcaaaatcccacagtgcaaggcgctgtatccaaagctcatggcggggaccacagaacccacgtggccatcataccacaagcgcaggtagattaagtggcgacccctcataaacacgctggacataaacattacctcttttggcatgttgtaattcaccacctcccggtaccatataaacctctgattaaacatggcgccatccaccaccatcctaaaccagctggccaaaacctgcccgccggctatacactgcagggaaccgggactggaacaatgacagtggagagcccaggactcgtaaccatggatcatcatgctcgtcatgatatcaatgttggcacaacacaggcacacgtgcatacacttcctcaggattacaagctcctcccgcgttagaaccatatcccagggaacaacccattcctgaatcagcgtaaatcccacactgcagggaagacctcgcacgtaactcacgttgtgcattgtcaaagtgttacattcgggcagcagcggatgatcctccagtatggtagcgcgggtttctgtctcaaaaggaggtagacgatccctactgtacggagtgcgccgagacaaccgagatcgtgttggtcgtagtgtcatgccaaatggaacgccggacgtagtcatatttcctgaagcaaaaccaggtgcgggcgtgacaaacagatctgcgtctccggtctcgccgcttagatcgctctgtgtagtagttgtagtatatccactctctcaaagcatccaggcgccccctggcttcgggttctatgtaaactccttcatgcgccgctgccctgataacatccaccaccgcagaataagccacacccagccaacctacacattcgttctgcgagtcacacacgggaggagcgggaagagctggaagaaccatggtggcatttgcaaaagcctaggcctccaaaaaagcctcctcactacttctggaatagctcagaggccgaggcggcctcggcctctgcataaataaaaaaaattagtcagccatggggcggagaatgggcggaactgggcggagttaggggcgggatgggcggagttaggggcgggactatggttgctgactaattgagatgcatgctttgcatacttctgcctgctggggagcctggggactttccacacctggttgctgactaattgagatgcatgctttgcatacttctgcctgctggggagcctggggactttccacaccctaactgacacacacgttacgtcacttcccattttaagaaaactacaattcccaacacatacaagttactccgcccttaattaaatcggatccgatatctagatgtattcgcgaggtaccgagctcgaattctctggccgtcgttttacaacgtcgtgactgggaaaaccctggcgttacccaacttaatcgccttgcagcacatccccctttcgccagctggcgtaatagcgaagaggcccgcaccgatcgcccttcccaacagttgcgcagcctgaatggcgaatggcgcctgatgcggtattttctccttacgcatctgtgcggtatttcacaccgcatatggtgcactctcagtacaatctgctctgatgccgcatagttaagccagccccgacacccgccaacacccgctgacgcgccctgacgggcttgtctgctcccggcatccgcttacagacaagctgtgaccgtctccgggagctgcatgtgtcagaggttttcaccgtcatcaccgaaacgcgcga

SEQ ID NO: 57 - DNA, 14977 bp, Artificial Sequence
  Description of Artificial Sequence: Synthetic polynucleotide
tgcagctctggcccgtgtctcaaaatctctgatgttacattgcacaagataaaaatatatcatcatgaacaataaaactgtctgcttacataaacagtaatacaaggggtgttatgagccatattcaacgggaaacgtcgaggccgcgattaaattccaacatggatgctgatttatatgggtataaatgggctcgcgataatgtcgggcaatcaggtgcgacaatctatcgcttgtatgggaagcccgatgcgccagagttgtttctgaaacatggcaaaggtagcgttgccaatgatgttacagatgagatggtcagactaaactggctgacggaatttatgcctcttccgaccatcaagcattttatccgtactcctgatgatgcatggttactcaccactgcgatccccggaaaaacagcattccaggtattagaagaatatcctgattcaggtgaaaatattgttgatgcgctggcagtgttcctgcgccggttgcattcgattcctgtttgtaattgtccttttaacagcgatcgcgtatttcgtctcgctcaggcgcaatcacgaatgaataacggtttggttgatgcgagtgattttgatgacgagcgtaatggctggcctgttgaacaagtctggaaagaaatgcataaacttttgccattctcaccggattcagtcgtcactcatggtgatttctcacttgataaccttatttttgacgaggggaaattaataggttgtattgatgttggacgagtcggaatcgcagaccgataccaggatcttgccatcctatggaactgcctcggtgagttttctccttcattacagaaacggctttttcaaaaatatggtattgataatcctgatatgaataaattgcagtttcatttgatgctcgatgagtttttctaatcagaattggttaattggttgtaacattattcagattgggcttgatttaaaacttcatttttaatttaaaaggatctaggtgaagatcctttttgataatctcatgaccaaaatcccttaacgtgagttttcgttccactgagcgtcagaccccgtagaaaagatcaaaggatcttcttgagatcctttttttctgcgcgtaatctgctgcttgcaaacaaaaaaaccaccgctaccagcggtggtttgtttgccggatcaagagctaccaactctttttccgaaggtaactggcttcagcagagcgcagataccaaatactgttcttctagtgtagccgtagttaggccaccacttcaagaactctgtagcaccgcctacatacctcgctctgctaatcctgttaccagtggctgctgccagtggcgataagtcgtgtcttaccgggttggactcaagacgatagttaccggataaggcgcagcggtcgggctgaacggggggttcgtgcacacagcccagcttggagcgaacgacctacaccgaactgagatacctacagcgtgagctatgagaaagcgccacgcttcccgaagggagaaaggcggacaggtatccggtaagcggcagggtcggaacaggagagcgcacgagggagcttccagggggaaacgcctggtatctttatagtcctgtcgggtttcgccacctctgacttgagcgtcgatttttgtgatgctcgtcaggggggcggagcctatggaaaaacgccagcaacgcggcctttttacggttcctggccttttgctggccttttgctcacatgttctttcctgcgttatcccctgattctgtggataaccgtattaccgcctttgagtgagctgataccgctcgccgcagccgaacgaccgagcgcagcgagtcagtgagcgaggaagcggaagagcgcccaatacgcaaaccgcctctccccgcgcgttggccgattcattaatgcagctggcacgacaggtttcccgactggaaagcgggcagtgagcgcaacgcaattaatgtgagttagctcactcattaggcaccccaggctttacactttatgcttccggctcgtatgttgtgtggaattgtgagcggataacaatttcacacaggaaacagctatgaccatgattacaccaagcttgcatgcaggcctctgcagtcgaccagaagcaccatgtccttgggtccggcctgctgaatgcgcaggcggtcggccatgccccaggcttcgttttgacatcggcgcaggtctttgtagtagtcttgcatgagcctttctaccggcacttcttcttctccttcctcttgtcctgcatctcttgcatctatcgctgcggcggcggcggagtttggccgtaggtggcgccctcttcctcccatgcgtgtgaccccgaagcccctcatcggctgaagcagggctaggtcggcgacaacgcgctcggctaatatggcctgctgcacctgcgtgagggtagactggaagtcatccatgtccacaaagcggtggtatgcgcccgtgttgatggtgtaagtgcagttggccataacggaccagttaacggtctggtgacccggctgcgagagctcggtgtacctgagacgcgagtaagccctcgagtcaaatacgtagtcgttgcaagtccgcaccaggtactggtatcccaccaaaaagtgcggcggcggctggcggtagaggggccagcgtagggtggccggggctccgggggcgagatcttccaacataaggcgatgatatccgtagatgtacctggacatccaggtgatgccggcggcggtggtggaggcgcgcggaaagtcgcggacgcggttccagatgttgcgcagcggcaaaaagtgctccatggtcgggacgctctggccggtcaggcgcgcgcaatcgttgacgctctagcgtgcaaaaggagagcctgtaagcgggcactcttccgtggtctggtggataaattcgcaagggtatcatggcggacgaccggggttcgagccccgtatccggccgtccgccgtgatccatgcggttaccgcccgcgtgtcgaacccaggtgtgcgacgtcagacaacgggggagtgctccttttggcttccttccaggcgcggcggctgctgcgctagcttttttggccactggccgcgcgcagcgtaagcggttaggctggaaagcgaaagcattaagtggctcgctccctgtagccggagggttattttccaagggttgagtcgcgggacccccggttcgagtctcggaccgagactgggggcgtacactggatggcctttgcctggaacccgcactcaaaaacatgctacctctttgagccctttggcttttctgaccagcgactcaagcaggtttaccagtttgagtacgagtcactcctgcgccgtagcgccattgcttcttcccccgaccgctgtataacgctggaaaagtccacccaaagcgtacaggggcccaactcggccgcctgtggactattctgctgcatgtttctccacgcctttgccaactggccccaaactcccatggatcacaaccccaccatgaaccttattaccggggtacccaactccatgctcaacagtccccaggtacagcccaccctgcgtcgcaaccaggaacagctctacagcttcctggagcgccactcgccctacttccgcagccacagtgcgcagattaggagcgccacttctttttgtcacttgaaaaacatgtaaaaataatgtactagagacactttcaataaaggcaaatgcttttatttgtacactctcgggtgattatttacccccacccttgccgtctgcgccgtttaaaaatcaaaggggttctgccgcgcatcgctatgcgccactggcagggacacgttgcgatactggtgtttagtgctccacttaaactcaggcacaaccatccgcggcagctcggtgaagttttcactccacaggctgcgcaccatcaccaacgcgtttagcaggtcgggcgccgatatcttgaagtcgcagttggggcctccgccctgcgcgcgcgagttgcgatacacagggttgcagcactggaacactatcagcgccgggtggtgcacgctggccagcacgctcttgtcggagatcagatccgcgtccaggtcctccgcgttgctcagggcgaacggagtcaactttggtagctgccttcccaaaaagggcgcgtgcccaggctttgagttgcactcgcaccgtagtggcatcaaaaggtgaccgtgcccggtctgggcgttaggatacagcgcctgcataaaagccttgatctgcttaaaagccacctgagcctttgcgccttcagagaagaacatgccgcaagacttgccggaaaactgattggccggacaggccgcgtcgtgcacgcagcaccttgcgtcggtgttggagatctgcaccacatttcggccccaccggttcttcacgatcttggccttgctagactgctccttcagcgcgcgctgcccgttttcgctcgtcacatccatttcaatcacgtgctccttatttatcataatgcttccgtgtagacacttaagctcgccttcgatctcagcgcagcggtgcagccacaacgcgcagcccgtgggctcgtgatgcttgtaggtcacctctgcaaacgactgcaggtacgcctgcaggaatcgccccatcatcgtcacaaaggtcttgttgctggtgaaggtcagctgcaacccgcggtgctcctcgttcagccaggtcttgcatacggccgccagagcttccacttggtcaggcagtagtttgaagttcgcctttagatcgttatccacgtggtacttgtccatcagcgcgcgcgcagcctccatgcccttctcccacgcagacacgatcggcacactcagcgggttcatcaccgtaatttcactttccgcttcgctgggctcttcctcttcctcttgcgtccgcataccacgcgccactgggtcgtcttcattcagccgccgcactgtgcgcttacctcctttgccatgcttgattagcaccggtgggttgctgaaacccaccatttgtagcgccacatcttctctttcttcctcgctgtccacgattacctctggtgatggcgggcgctcgggcttgggagaagggcgcttctttttcttcttgggcgcaatggccaaatccgccgccgaggtcgatggccgcgggctgggtgtgcgcggcaccagcgcgtcttgtgatgagtcttcctcgtcctcggactcgatacgccgcctcatccgcttttttgggggcgcccggggaggcggcggcgacggggacggggacgacacgtcctccatggttgggggacgtcgcgccgcaccgcgtccgcgctcgggggtggtttcgcgctgctcctcttcccgactggccatttccttctcctataggcagaaaaagatccacaaaagcgaagatcagcttcggcgcacgctggaagacgcggaggctctcttcagtaaatactgcgcgctgactcttaaggactagtttcgcgccctttctcaaatttaagcgcgaaaactacgtcatctccagcggccacacccggcgccagcacctgttgtcagcgccattggcgcgcccgcccgccgcgcgcttcgctttttatagggccgccgccgccgccgcctcgccataaaaggaaactttcggagcgcgccgctctgattggctgccgccgcacctctccgcctcgccccgccccgcccctcgccccgccccgccccgcctggcgcgcgccccccccccccccccgcccccatcgctgcacaaaataattaaaaaataaataaatacaaaattgggggtggggaggggggggagatggggagagtgaagcagaacgtggggctcacctcgaggccggccgaatatcttcatttaaatgggcagagcgcacatcgcccacagtccccgagaagttggggggaggggtcggcaattgaaccggtgcctagagaaggtggcgcggggtaaactgggaaagtgatgtcgtgtactggctccgcctttttcccgagggtgggggagaaccgtatataagtgcagtagtcgccgtgaacgttctttttcgcaacgggtttgccgccagaacacagcaccgcgggcccgatccaccggtactgttggtaaagccaccatgttttccggtggcggcggcccgctgtcccccggaggaaagtcggcggccagggcggcgtccgggttttttgcgcccgccggccctcgcggagccagccggggacccccgccttgtttgaggcaaaacttttacaacccctacctcgccccagtcgggacgcaacagaagccgaccgggccaacccagcgccatacgtactatagcgaatgcgatgaatttcgattcatcgccccgcgggtgctggacgaggatgcccccccggagaagcgcgccggggtgcacgacggtcacctcaagcgcgcccccaaggtgtactgcgggggggacgagcgcgacgtcctccgcgtcgggtcgggcggcttctggccgcggcgctcgcgcctgtggggcggcgtggaccacgccccggcggggttcaaccccaccgtcaccgtctttcacgtgtacgacatcctggagaacgtggagcacgcgtacggcatgcgcgcggcccagttccacgcgcggtttatggacgccatcacaccgacggggaccgtcatcacgctcctgggcctgactccggaaggccaccgggtggccgttcacgtttacggcacgcggcagtacttttacatgaacaaggaggaggtcgacaggcacctacaatgccgcgccccacgagatctctgcgagcgcatggccgcggccctgcgcgagtccccgggcgcgtcgttccgcggcatctccgcggaccacttcgaggcggaggtggtggagcgcaccgacgtgtactactacgagacgcgccccgctctgttttaccgcgtctacgtccgaagcgggcgcgtgctgtcgtacctgtgcgacaacttctgcccggccatcaagaagtacgagggtggggtcgacgccaccacccggttcatcctggacaaccccgggttcgtcaccttcggctggtaccgtctcaaaccgggccggaacaacacgctagcccagccgcgggccccgatggccttcgggacatccagcgacgtcgagtttaactgtacggcggacaacctggccatcgaggggggcatgagcgacctaccggcatacaagctcatgtgcttcgatatcgaatgcaaggcggggggggaggacgagctggcctttccggtggccgggcacccggaggacctggtcatccagatatcctgtctgctctacgacctgtccaccaccgccctggagcacgtcctcctgttttcgctcggttcctgcgacctccccgaatcccacctgaacgagctggcggccaggggcctgcccacgcccgtggttctggaattcgacagcgaattcgagatgctgttggccttcatgacccttgtgaaacagtacggccccgagttcgtgaccgggtacaacatcatcaacttcgactggcccttcttgctggccaagctgacggacatttacaaggtccccctggacgggtacggccgcatgaacggccggggcgtgtttcgcgtgtgggacataggccagagccacttccagaagcgcagcaagataaaggtgaacggcatggtgaacatcgacatgtacgggattataaccgacaagatcaagctctcgagctacaagctcaacgccgtggccgaagccgtcctgaaggacaagaagaaggacctgagctatcgcgacatccccgcctactacgccgccgggcccgcgcaacgcggggtgatcggcgagtactgcatacaggattccctgctggtgggccagctgttttttaagtttttgccccatctggagctctcggccgtcgcgcgcttggcgggtattaacatcacccgcaccatctacgacggccagcagatccgcgtctttacgtgcctgctgcgcctggccgaccagaagggctttattctgccggacacccaggggcgatttaggggcgccgggggggaggcgcccaagcgtccggccgcagcccgggaggacgaggagcggccagaggaggagggggaggacgaggacgaacgcgaggagggcgggggcgagcgggagccggagggcgcgcgggagaccgccggcaggcacgtggggtaccagggggccagggtccttgaccccacttccgggtttcacgtgaaccccgtggtggtgttcgactttgccagcctgtaccccagcatcatccaggcccacaacctgtgcttcagcacgctctccctgagggccgacgcagtggcgcacctggaggcgggcaaggactacctggagatcgaggtgggggggcgacggctgttcttcgtcaaggctcacgtgcgagagagcctcctcagcatcctcctgcgggactggctcgccatgcgaaagcagatccgctcgcggattccccagagcagccccgaggaggccgtgctcctggacaagcagcaggccgccatcaaggtcgtgtgtaactcggtgtacgggttcacgggagtgcagcacggactcctgccgtgcctgcacgttgccgcgacggtgacgaccatcggccgcgagatgctgctcgcgacccgcgagtacgtccacgcgcgctgggcggccttcgaacagctcctggccgatttcccggaggcggccgacatgcgcgcccccgggccctattccatgcgcatcatctacggggacacggactccatctttgtgctgtgccgcggcctcacggccgccgggctgacggccgtgggcgacaagatggcgagccacatctcgcgcgcgctgtttctgccccccatcaaactcgagtgcgaaaagacgttcaccaagctgctgctgatcgccaagaaaaagtacatcggcgtcatctacgggggtaagatgctcatcaagggcgtggatctggtgcgcaaaaacaactgcgcgtttatcaaccgcacctccagggccctggtcgacctgctgttttacgacgataccgtctccggagcggccgccgcgttagccgagcgccccgcggaggagtggctggcgcgacccctgcccgagggactgcaggcgttcggggccgtcctcgtagacgcccatcggcgcatcaccgacccggagagggacatccaggactttgtcctcaccgccgaactgagcagacacccgcgcgcgtacaccaacaagcgcctggcccacctgacggtgtattacaagctcatggcccgccgcgcgcaggtcccgtccatcaaggaccggatcccgtacgtgatcgtggcccagacccgcgaggtagaggagacggtcgcgcggctggccgccctccgcgagctagacgccgccgccccaggggacgagcccgccccccccgcggccctgccctccccggccaagcgcccccgggagacgccgtcgcctgccgaccccccgggaggcgcgtccaagccccgcaagctgctggtgtccgagctggccgaggatcccgcatacgccattgcccacggcgtcgccctgaacacggactattacttctcccacctgttgggggcggcgtgcgtgacattcaaggccctgtttgggaataacgccaagatcaccgagagtctgttaaaaaggtttattcccgaagtgtggcaccccccggacgacgtggccgcgcggctccggaccgcagggttcggggcggtgggtgccggcgctacggcggaggaaactcgtcgaatgttgcatagagcctttgatactctagcagaattcggcagtggagcaacaaacttctctctgctgaaacaagccggagatgtcgaagagaatcctggaccgacggattcccctggcggtgtggcccccgcctcccccgtggaggacgcgtcggacgcgtccctcgggcagccggaggagggggcgccctgccaggtggtcctgcagggcgccgaacttaatggaatcctacaggcgtttgccccgctgcgcacgagccttctggactcgcttctggttatgggcgaccggggcatccttatccataacacgatctttggggagcaggtgttcctgcccctggaacactcgcaattcagtcggtatcgctggcgcggacccacggcggcgttcctgtctctcgtggaccagaagcgctccctcctgagcgtgtttcgcgccaaccagtacccggacctacgtcgggtggagttggcgatcacgggccaggccccgtttcgcacgctggttcagcgcatatggacgacgacgtccgacggcgaggccgttgagctagccagcgagacgctgatgaagcgcgaactgacgagctttgtggtgctggttccccagggaacccccgacgttcagttgcgcctgacgaggccgcagctcaccaaggtccttaacgcgaccggggccgatagtgccacgcccaccacgttcgagctcggggttaacggcaaattttccgtgttcaccacgagtacctgcgtcacctttgctgcccgcgaggagggcgtgtcgtccagcaccagcacccaggtccagatcctgtccaacgcgctcaccaaggcgggccaggcggccgccaacgccaagacggtgtacggggaaaatacccatcgcaccttctctgtggtcgtcgacgattgcagcatgcgggcggtgctccggcgactgcaggtcggcgggggcaccctcaagttcttcctcacgacccccgtccccagtctgtgcgtcaccgccaccggtcccaacgcggtatcggcggtatttctcctgaaaccccagaagatttgcctggactggctgggtcatagccaggggtctccttcagccgggagctcggcctcccgggcctctgggagcgagccaacagacagccaggactccgcgtcggacgcggtcagccacggcgatccggaagacctcgatggcgctgcccgggcgggagaggcgggggccttgcatgcctgtccgatgccgtcgtcgaccacgcgggtcactcccacgaccaagcgggggcgctcggggggcgaggatgcgcgcgcggacacggccctaaagaaacctaagacggggtcgcccaccgcacccccgcccgcagatccagtccccctggacacggaggacgactccgatgcggcggacgggacggcggcccgtcccgccgctccagacgcccggagcggaagccgttacgcgtgttactttcgcgacctcccgaccggagaagcaagccccggcgccttctccgccttccgggggggcccccaaaccccgtatggttttggattcccctgataagatccgactgcaggtagaataaaggaaatttattttcattgcaatagtgtgttggaattttttgtgtctctcagtttaaacgcggccgccgtttgtgttatgtttcaacgtgtttatttttcaattgcagaaaatttcaagtcatttttcattcagtagtatagccccaccaccacatagcttatacagatcaccgtaccttaatcaaactcacagaaccctagtattcaacctgccacctccctcccaacacacagagtacacagtcctttctccccggctggccttaaaaagcatcatatcatgggtaacagacatattcttaggtgttatattccacacggtttcctgtcgagccaaacgctcatcagtgatattaataaactccccgggcagctcacttaagttcatgtcgctgtccagctgctgagccacaggctgctgtccaacttgcggttgcttaacgggcggcgaaggagaagtccacgcctacatgggggtagagtcataatcgtgcatcaggatagggcggtggtgctgcagcagcgcgcgaataaactgctgccgccgccgctccgtcctgcaggaatacaacatggcagtggtctcctcagcgatgattcgcaccgcccgcagcataaggcgccttgtcctccgggcacagcagcgcaccctgatctcacttaaatcagcacagtaactgcagcacagcaccacaatattgttcaaaatcccacagtgcaaggcgctgtatccaaagctcatggcggggaccacagaacccacgtggccatcataccacaagcgcaggtagattaagtggcgacccctcataaacacgctggacataaacattacctcttttggcatgttgtaattcaccacctcccggtaccatataaacctctgattaaacatggcgccatccaccaccatcctaaaccagctggccaaaacctgcccgccggctatacactgcagggaaccgggactggaacaatgacagtggagagcccaggactcgtaaccatggatcatcatgctcgtcatgatatcaatgttggcacaacacaggcacacgtgcatacacttcctcaggattacaagctcctcccgcgttagaaccatatcccagggaacaacccattcctgaatcagcgtaaatcccacactgcagggaagacctcgcacgtaactcacgttgtgcattgtcaaagtgttacattcgggcagcagcggatgatcctccagtatggtagcgcgggtttctgtctcaaaaggaggtagacgatccctactgtacggagtgcgccgagacaaccgagatcgtgttggtcgtagtgtcatgccaaatggaacgccggacgtagtcatatttcctgaagcaaaaccaggtgcgggcgtgacaaacagatctgcgtctccggtctcgccgcttagatcgctctgtgtagtagttgtagtatatccactctctcaaagcatccaggcgccccctggcttcgggttctatgtaaactccttcatgcgccgctgccctgataacatccaccaccgcagaataagccacacccagccaacctacacattcgttctgcgagtcacacacgggaggagcgggaagagctggaagaaccatgtttttttttttattccaaaagattatccaaaacctcaaaatgaagatctattaagtgaacgcgctcccctccggtggcgtggtcaaactctacagccaaagaacagataatggcatttgtaagatgttgcacaatggcttccaaaaggcaaacggccctcacgtccaagtggacgtaaaggctaaacccttcagggtgaatctcctctataaacattccagcaccttcaaccatgcccaaataattctcatctcgccaccttctcaatatatctctaagcaaatcccgaatattaagtccggccattgtaaaaatctgctccagagcgccctccaccttcagcctcaagcagcgaatcatgattgcaaaaattcaggttcctcacagacctgtataagattcaaaagcggaacattaacaaaaataccgcgatcccgtaggtcccttcgcagggccagctgaacataatcgtgcaggtctgcacggaccagcgcggccacttccccgccaggaaccatgacaaaagaacccacactgattatgacacgcatactcggagctatgctaaccagcgtagccccgatgtaagcttgttgcatgggcggcgatataaaatgcaaggtgctgctcaaaaaatcaggcaaagcctcgcgcaaaaaagaaagcacatcgtagtcatgctcatgcagataaaggcaggtaagctccggaaccaccacagaaaaagacaccatttttctctcaaacatgtctgcgggtttctgcataaacacaaaataaaataacaaaaaaacatttaaacattagaagcctgtcttacaacaggaaaaacaacccttataagcataagacggactacggccatgccggcgtgaccgtaaaaaaactggtcaccgtgattaaaaagcaccaccgacagctcctcggtcatgtccggagtcataatgtaagactcggtaaacacatcaggttgattcacatcggtcagtgctaaaaagcgaccgaaatagcccgggggaatacatacccgcaggcgtagagacaacattacagcccccataggaggtataacaaaattaataggagagaaaaacacataaacacctgaaaaaccctcctgcctaggcaaaatagcaccctcccgctccagaacaacatacagcgcttccacagcggcagccataacagtcagccttaccagtaaaaaagaaaacctattaaaaaaacaccactcgacacggcaccagctcaatcagtcacagtgtaaaaaagggccaagtgcagagcgagtatatataggactaaaaaatgacgtaacggttaaagtccacaaaaaacacccagaaaaccgcacgcgaacctacgcccagaaacgaaagccaaaaaacccacaacttcctcaaatcgtcacttccgttttcccacgttacgtcacttcccattttaagaaaactacaattcccaacacatacaagttactccgcccttaattaaatcggatccgatatctagatgtattcgcgaggtaccgagctcgaattctctggccgtcgttttacaacgtcgtgactgggaaaaccctggcgttacccaacttaatcgccttgcagcacatccccctttcgccagctggcgtaatagcgaagaggcccgcaccgatcgcccttcccaacagttgcgcagcctgaatggcgaatggcgcctgatgcggtattttctccttacgcatctgtgcggtatttcacaccgcatatggtgcactctcagtacaatctgctctgatgccgcatagttaagccagccccgacacccgccaacacccgctgacgcgccctgacgggcttgtctgctcccggcatccgcttacagacaagctgtgaccgtctccgggagctgcatgtgtcagaggttttcaccgtcatcaccgaaacgcgcga

SEQ ID NO: 58 - DNA, 15278 bp, Artificial Sequence
  Description of Artificial Sequence: Synthetic polynucleotide
tgcagctctggcccgtgtctcaaaatctctgatgttacattgcacaagataaaaatatatcatcatgaacaataaaactgtctgcttacataaacagtaatacaaggggtgttatgagccatattcaacgggaaacgtcgaggccgcgattaaattccaacatggatgctgatttatatgggtataaatgggctcgcgataatgtcgggcaatcaggtgcgacaatctatcgcttgtatgggaagcccgatgcgccagagttgtttctgaaacatggcaaaggtagcgttgccaatgatgttacagatgagatggtcagactaaactggctgacggaatttatgcctcttccgaccatcaagcattttatccgtactcctgatgatgcatggttactcaccactgcgatccccggaaaaacagcattccaggtattagaagaatatcctgattcaggtgaaaatattgttgatgcgctggcagtgttcctgcgccggttgcattcgattcctgtttgtaattgtccttttaacagcgatcgcgtatttcgtctcgctcaggcgcaatcacgaatgaataacggtttggttgatgcgagtgattttgatgacgagcgtaatggctggcctgttgaacaagtctggaaagaaatgcataaacttttgccattctcaccggattcagtcgtcactcatggtgatttctcacttgataaccttatttttgacgaggggaaattaataggttgtattgatgttggacgagtcggaatcgcagaccgataccaggatcttgccatcctatggaactgcctcggtgagttttctccttcattacagaaacggctttttcaaaaatatggtattgataatcctgatatgaataaattgcagtttcatttgatgctcgatgagtttttctaatcagaattggttaattggttgtaacattattcagattgggcttgatttaaaacttcatttttaatttaaaaggatctaggtgaagatcctttttgataatctcatgaccaaaatcccttaacgtgagttttcgttccactgagcgtcagaccccgtagaaaagatcaaaggatcttcttgagatcctttttttctgcgcgtaatctgctgcttgcaaacaaaaaaaccaccgctaccagcggtggtttgtttgccggatcaagagctaccaactctttttccgaaggtaactggcttcagcagagcgcagataccaaatactgttcttctagtgtagccgtagttaggccaccacttcaagaactctgtagcaccgcctacatacctcgctctgctaatcctgttaccagtggctgctgccagtggcgataagtcgtgtcttaccgggttggactcaagacgatagttaccggataaggcgcagcggtcgggctgaacggggggttcgtgcacacagcccagcttggagcgaacgacctacaccgaactgagatacctacagcgtgagctatgagaaagcgccacgcttcccgaagggagaaaggcggacaggtatccggtaagcggcagggtcggaacaggagagcgcacgagggagcttccagggggaaacgcctggtatctttatagtcctgtcgggtttcgccacctctgacttgagcgtcgatttttgtgatgctcgtcaggggggcggagcctatggaaaaacgccagcaacgcggcctttttacggttcctggccttttgctggccttttgctcacatgttctttcctgcgttatcccctgattctgtggataaccgtattaccgcctttgagtgagctgataccgctcgccgcagccgaacgaccgagcgcagcgagtcagtgagcgaggaagcggaagagcgcccaatacgcaaaccgcctctccccgcgcgttggccgattcattaatgcagctggcacgacaggtttcccgactggaaagcgggcagtgagcgcaacgcaattaatgtgagttagctcactcattaggcaccccaggctttacactttatgcttccggctcgtatgttgtgtggaattgtgagcggataacaatttcacacaggaaacagctatgaccatgattacaccaagcttgcatgcaggcctctgcagtcgaccagaagcaccatgtccttgggtccggcctgctgaatgcgcaggcggtcggccatgccccaggcttcgttttgacatcggcgcaggtctttgtagtagtcttgcatgagcctttctaccggcacttcttcttctccttcctcttgtcctgcatctcttgcatctatcgctgcggcggcggcggagtttggccgtaggtggcgccctcttcctcccatgcgtgtgaccccgaagcccctcatcggctgaagcagggctaggtcggcgacaacgcgctcggctaatatggcctgctgcacctgcgtgagggtagactggaagtcatccatgtccacaaagcggtggtatgcgcccgtgttgatggtgtaagtgcagttggccataacggaccagttaacggtctggtgacccggctgcgagagctcggtgtacctgagacgcgagtaagccctcgagtcaaatacgtagtcgttgcaagtccgcaccaggtactggtatcccaccaaaaagtgcggcggcggctggcggtagaggggccagcgtagggtggccggggctccgggggcgagatcttccaacataaggcgatgatatccgtagatgtacctggacatccaggtgatgccggcggcggtggtggaggcgcgcggaaagtcgcggacgcggttccagatgttgcgcagcggcaaaaagtgctccatggtcgggacgctctggccggtcaggcgcgcgcaatcgttgacgctctagcgtgcaaaaggagagcctgtaagcgggcactcttccgtggtctggtggataaattcgcaagggtatcatggcggacgaccggggttcgagccccgtatccggccgtccgccgtgatccatgcggttaccgcccgcgtgtcgaacccaggtgtgcgacgtcagacaacgggggagtgctccttttggcttccttccaggcgcggcggctgctgcgctagcttttttggccactggccgcgcgcagcgtaagcggttaggctggaaagcgaaagcattaagtggctcgctccctgtagccggagggttattttccaagggttgagtcgcgggacccccggttcgagtctcggaccgagactgggggcgtacactggatggcctttgcctggaacccgcactcaaaaacatgctacctctttgagccctttggcttttctgaccagcgactcaagcaggtttaccagtttgagtacgagtcactcctgcgccgtagcgccattgcttcttcccccgaccgctgtataacgctggaaaagtccacccaaagcgtacaggggcccaactcggccgcctgtggactattctgctgcatgtttctccacgcctttgccaactggccccaaactcccatggatcacaaccccaccatgaaccttattaccggggtacccaactccatgctcaacagtccccaggtacagcccaccctgcgtcgcaaccaggaacagctctacagcttcctggagcgccactcgccctacttccgcagccacagtgcgcagattaggagcgccacttctttttgtcacttgaaaaacatgtaaaaataatgtactagagacactttcaataaaggcaaatgcttttatttgtacactctcgggtgattatttacccccacccttgccgtctgcgccgtttaaaaatcaaaggggttctgccgcgcatcgctatgcgccactggcagggacacgttgcgatactggtgtttagtgctccacttaaactcaggcacaaccatccgcggcagctcggtgaagttttcactccacaggctgcgcaccatcaccaacgcgtttagcaggtcgggcgccgatatcttgaagtcgcagttggggcctccgccctgcgcgcgcgagttgcgatacacagggttgcagcactggaacactatcagcgccgggtggtgcacgctggccagcacgctcttgtcggagatcagatccgcgtccaggtcctccgcgttgctcagggcgaacggagtcaactttggtagctgccttcccaaaaagggcgcgtgcccaggctttgagttgcactcgcaccgtagtggcatcaaaaggtgaccgtgcccggtctgggcgttaggatacagcgcctgcataaaagccttgatctgcttaaaagccacctgagcctttgcgccttcagagaagaacatgccgcaagacttgccggaaaactgattggccggacaggccgcgtcgtgcacgcagcaccttgcgtcggtgttggagatctgcaccacatttcggccccaccggttcttcacgatcttggccttgctagactgctccttcagcgcgcgctgcccgttttcgctcgtcacatccatttcaatcacgtgctccttatttatcataatgcttccgtgtagacacttaagctcgccttcgatctcagcgcagcggtgcagccacaacgcgcagcccgtgggctcgtgatgcttgtaggtcacctctgcaaacgactgcaggtacgcctgcaggaatcgccccatcatcgtcacaaaggtcttgttgctggtgaaggtcagctgcaacccgcggtgctcctcgttcagccaggtcttgcatacggccgccagagcttccacttggtcaggcagtagtttgaagttcgcctttagatcgttatccacgtggtacttgtccatcagcgcgcgcgcagcctccatgcccttctcccacgcagacacgatcggcacactcagcgggttcatcaccgtaatttcactttccgcttcgctgggctcttcctcttcctcttgcgtccgcataccacgcgccactgggtcgtcttcattcagccgccgcactgtgcgcttacctcctttgccatgcttgattagcaccggtgggttgctgaaacccaccatttgtagcgccacatcttctctttcttcctcgctgtccacgattacctctggtgatggcgggcgctcgggcttgggagaagggcgcttctttttcttcttgggcgcaatggccaaatccgccgccgaggtcgatggccgcgggctgggtgtgcgcggcaccagcgcgtcttgtgatgagtcttcctcgtcctcggactcgatacgccgcctcatccgcttttttgggggcgcccggggaggcggcggcgacggggacggggacgacacgtcctccatggttgggggacgtcgcgccgcaccgcgtccgcgctcgggggtggtttcgcgctgctcctcttcccgactggccatttccttctcctataggcagaaaaagatccacaaaagcgaagatcagcttcggcgcacgctggaagacgcggaggctctcttcagtaaatactgcgcgctgactcttaaggactagtttcgcgccctttctcaaatttaagcgcgaaaactacgtcatctccagcggccacacccggcgccagcacctgttgtcagcgccattggcgcgcccgcccgccgcgcgcttcgctttttatagggccgccgccgccgccgcctcgccataaaaggaaactttcggagcgcgccgctctgattggctgccgccgcacctctccgcctcgccccgccccgcccctcgccccgccccgccccgcctggcgcgcgccccccccccccccccgcccccatcgctgcacaaaataattaaaaaataaataaatacaaaattgggggtggggaggggggggagatggggagagtgaagcagaacgtggggctcacctcgaggccggccgaatatcttcatttaaatgtgtgtcagttagggtgtggaaagtccccaggctccccagcaggcagaagtatgcaaagcatgcatctcaattagtcagcaaccaggtgtggaaagtccccaggctccccagcaggcagaagtatgcaaagcatgcatctcaattagtcagcaaccatagtcccgcccctaactccgcccatcccgcccctaactccgcccagttccgcccattctccgccccatggctgactaattttttttatttatgcagaggccgaggccgcctcggcctctgagctattccagaagtagtgaggaggcttttttggaggcctaggcttttgcaaacgccggcgcaccgcgggcccgatccaccggtactgttggtaaagccaccatgttttccggtggcggcggcccgctgtcccccggaggaaagtcggcggccagggcggcgtccgggttttttgcgcccgccggccctcgcggagccagccggggacccccgccttgtttgaggcaaaacttttacaacccctacctcgccccagtcgggacgcaacagaagccgaccgggccaacccagcgccatacgtactatagcgaatgcgatgaatttcgattcatcgccccgcgggtgctggacgaggatgcccccccggagaagcgcgccggggtgcacgacggtcacctcaagcgcgcccccaaggtgtactgcgggggggacgagcgcgacgtcctccgcgtcgggtcgggcggcttctggccgcggcgctcgcgcctgtggggcggcgtggaccacgccccggcggggttcaaccccaccgtcaccgtctttcacgtgtacgacatcctggagaacgtggagcacgcgtacggcatgcgcgcggcccagttccacgcgcggtttatggacgccatcacaccgacggggaccgtcatcacgctcctgggcctgactccggaaggccaccgggtggccgttcacgtttacggcacgcggcagtacttttacatgaacaaggaggaggtcgacaggcacctacaatgccgcgccccacgagatctctgcgagcgcatggccgcggccctgcgcgagtccccgggcgcgtcgttccgcggcatctccgcggaccacttcgaggcggaggtggtggagcgcaccgacgtgtactactacgagacgcgccccgctctgttttaccgcgtctacgtccgaagcgggcgcgtgctgtcgtacctgtgcgacaacttctgcccggccatcaagaagtacgagggtggggtcgacgccaccacccggttcatcctggacaaccccgggttcgtcaccttcggctggtaccgtctcaaaccgggccggaacaacacgctagcccagccgcgggccccgatggccttcgggacatccagcgacgtcgagtttaactgtacggcggacaacctggccatcgaggggggcatgagcgacctaccggcatacaagctcatgtgcttcgatatcgaatgcaaggcggggggggaggacgagctggcctttccggtggccgggcacccggaggacctggtcatccagatatcctgtctgctctacgacctgtccaccaccgccctggagcacgtcctcctgttttcgctcggttcctgcgacctccccgaatcccacctgaacgagctggcggccaggggcctgcccacgcccgtggttctggaattcgacagcgaattcgagatgctgttggccttcatgacccttgtgaaacagtacggccccgagttcgtgaccgggtacaacatcatcaacttcgactggcccttcttgctggccaagctgacggacatttacaaggtccccctggacgggtacggccgcatgaacggccggggcgtgtttcgcgtgtgggacataggccagagccacttccagaagcgcagcaagataaaggtgaacggcatggtgaacatcgacatgtacgggattataaccgacaagatcaagctctcgagctacaagctcaacgccgtggccgaagccgtcctgaaggacaagaagaaggacctgagctatcgcgacatccccgcctactacgccgccgggcccgcgcaacgcggggtgatcggcgagtactgcatacaggattccctgctggtgggccagctgttttttaagtttttgccccatctggagctctcggccgtcgcgcgcttggcgggtattaacatcacccgcaccatctacgacggccagcagatccgcgtctttacgtgcctgctgcgcctggccgaccagaagggctttattctgccggacacccaggggcgatttaggggcgccgggggggaggcgcccaagcgtccggccgcagcccgggaggacgaggagcggccagaggaggagggggaggacgaggacgaacgcgaggagggcgggggcgagcgggagccggagggcgcgcgggagaccgccggcaggcacgtggggtaccagggggccagggtccttgaccccacttccgggtttcacgtgaaccccgtggtggtgttcgactttgccagcctgtaccccagcatcatccaggcccacaacctgtgcttcagcacgctctccctgagggccgacgcagtggcgcacctggaggcgggcaaggactacctggagatcgaggtgggggggcgacggctgttcttcgtcaaggctcacgtgcgagagagcctcctcagcatcctcctgcgggactggctcgccatgcgaaagcagatccgctcgcggattccccagagcagccccgaggaggccgtgctcctggacaagcagcaggccgccatcaaggtcgtgtgtaactcggtgtacgggttcacgggagtgcagcacggactcctgccgtgcctgcacgttgccgcgacggtgacgaccatcggccgcgagatgctgctcgcgacccgcgagtacgtccacgcgcgctgggcggccttcgaacagctcctggccgatttcccggaggcggccgacatgcgcgcccccgggccctattccatgcgcatcatctacggggacacggactccatctttgtgctgtgccgcggcctcacggccgccgggctgacggccgtgggcgacaagatggcgagccacatctcgcgcgcgctgtttctgccccccatcaaactcgagtgcgaaaagacgttcaccaagctgctgctgatcgccaagaaaaagtacatcggcgtcatctacgggggtaagatgctcatcaagggcgtggatctggtgcgcaaaaacaactgcgcgtttatcaaccgcacctccagggccctggtcgacctgctgttttacgacgataccgtctccggagccgccgcggcgttagccgagcgccccgcggaggagtggctggcgcgacccctgcccgagggactgcaggcgttcggggccgtcctcgtagacgcccatcggcgcatcaccgacccggagagggacatccaggactttgtcctcaccgccgaactgagcagacacccgcgcgcgtacaccaacaagcgcctggcccacctgacggtgtattacaagctcatggcccgccgcgcgcaggtcccgtccatcaaggaccggatcccgtacgtgatcgtggcccagacccgcgaggtagaggagacggtcgcgcggctggccgccctccgcgagctagacgccgccgccccaggggacgagcccgccccccccgcggccctgccctccccggccaagcgcccccgggagacgccgtcgcctgccgaccccccgggaggcgcgtccaagccccgcaagctgctggtgtccgagctggccgaggatcccgcatacgccattgcccacggcgtcgccctgaacacggactattacttctcccacctgttgggggcggcgtgcgtgacattcaaggccctgtttgggaataacgccaagatcaccgagagtctgttaaaaaggtttattcccgaagtgtggcaccccccggacgacgtggccgcgcggctccggaccgcagggttcggggcggtgggtgccggcgctacggcggaggaaactcgtcgaatgttgcatagagcctttgatactctagcagaattcggcagtggagcaacaaacttctctctgctgaaacaagccggagatgtcgaagagaatcctggaccgacggattcccctggcggtgtggcccccgcctcccccgtggaggacgcgtcggacgcgtccctcgggcagccggaggagggggcgccctgccaggtggtcctgcagggcgccgaacttaatggaatcctacaggcgtttgccccgctgcgcacgagccttctggactcgcttctggttatgggcgaccggggcatccttatccataacacgatctttggggagcaggtgttcctgcccctggaacactcgcaattcagtcggtatcgctggcgcggacccacggcggcgttcctgtctctcgtggaccagaagcgctccctcctgagcgtgtttcgcgccaaccagtacccggacctacgtcgggtggagttggcgatcacgggccaggccccgtttcgcacgctggttcagcgcatatggacgacgacgtccgacggcgaggccgttgagctagccagcgagacgctgatgaagcgcgaactgacgagctttgtggtgctggttccccagggaacccccgacgttcagttgcgcctgacgaggccgcagctcaccaaggtccttaacgcgaccggggccgatagtgccacgcccaccacgttcgagctcggggttaacggcaaattttccgtgttcaccacgagtacctgcgtcacctttgctgcccgcgaggagggcgtgtcgtccagcaccagcacccaggtccagatcctgtccaacgcgctcaccaaggcgggccaggccgccgcgaacgccaagacggtgtacggggaaaatacccatcgcaccttctctgtggtcgtcgacgattgcagcatgcgggcggtgctccggcgactgcaggtcggcgggggcaccctcaagttcttcctcacgacccccgtccccagtctgtgcgtcaccgccaccggtcccaacgcggtatcggcggtatttctcctgaaaccccagaagatttgcctggactggctgggtcatagccaggggtctccttcagccgggagctcggcctcccgggcctctgggagcgagccaacagacagccaggactccgcgtcggacgcggtcagccacggcgatccggaagacctcgatggcgctgcccgggcgggagaggcgggggccttgcatgcctgtccgatgccgtcgtcgaccacgcgggtcactcccacgaccaagcgggggcgctcggggggcgaggatgcgcgcgcggacacggccctaaagaaacctaagacggggtcgcccaccgcacccccgcccgcagatccagtccccctggacacggaggacgactccgatgcggcggacgggacggcggcccgtcccgccgctccagacgcccggagcggaagccgttacgcgtgttactttcgcgacctcccgaccggagaagcaagccccggcgccttctccgccttccgggggggcccccaaaccccgtatggttttggattcccctgataggatccgactgcaggtagctgtgccttctagttgccagccatctgttgtttgcccctcccccgtgccttccttgaccctggaaggtgccactcccactgtcctttcctaataaaatgaggaaattgcatcgcattgtctgagtaggtgtcattctattctggggggtggggtggggcaggacagcaagggggaggattgggaagacaatagcaggcatgctggggatgcggtgggctctatgggtttaaacatcgatgcggccgccgtttgtgttatgtttcaacgtgtttatttttcaattgcagaaaatttcaagtcatttttcattcagtagtatagccccaccaccacatagcttatacagatcaccgtaccttaatcaaactcacagaaccctagtattcaacctgccacctccctcccaacacacagagtacacagtcctttctccccggctggccttaaaaagcatcatatcatgggtaacagacatattcttaggtgttatattccacacggtttcctgtcgagccaaacgctcatcagtgatattaataaactccccgggcagctcacttaagttcatgtcgctgtccagctgctgagccacaggctgctgtccaacttgcggttgcttaacgggcggcgaaggagaagtccacgcctacatgggggtagagtcataatcgtgcatcaggatagggcggtggtgctgcagcagcgcgcgaataaactgctgccgccgccgctccgtcctgcaggaatacaacatggcagtggtctcctcagcgatgattcgcaccgcccgcagcataaggcgccttgtcctccgggcacagcagcgcaccctgatctcacttaaatcagcacagtaactgcagcacagcaccacaatattgttcaaaatcccacagtgcaaggcgctgtatccaaagctcatggcggggaccacagaacccacgtggccatcataccacaagcgcaggtagattaagtggcgacccctcataaacacgctggacataaacattacctcttttggcatgttgtaattcaccacctcccggtaccatataaacctctgattaaacatggcgccatccaccaccatcctaaaccagctggccaaaacctgcccgccggctatacactgcagggaaccgggactggaacaatgacagtggagagcccaggactcgtaaccatggatcatcatgctcgtcatgatatcaatgttggcacaacacaggcacacgtgcatacacttcctcaggattacaagctcctcccgcgttagaaccatatcccagggaacaacccattcctgaatcagcgtaaatcccacactgcagggaagacctcgcacgtaactcacgttgtgcattgtcaaagtgttacattcgggcagcagcggatgatcctccagtatggtagcgcgggtttctgtctcaaaaggaggtagacgatccctactgtacggagtgcgccgagacaaccgagatcgtgttggtcgtagtgtcatgccaaatggaacgccggacgtagtcatatttcctgaagcaaaaccaggtgcgggcgtgacaaacagatctgcgtctccggtctcgccgcttagatcgctctgtgtagtagttgtagtatatccactctctcaaagcatccaggcgccccctggcttcgggttctatgtaaactccttcatgcgccgctgccctgataacatccaccaccgcagaataagccacacccagccaacctacacattcgttctgcgagtcacacacgggaggagcgggaagagctggaagaaccatgtttttttttttattccaaaagattatccaaaacctcaaaatgaagatctattaagtgaacgcgctcccctccggtggcgtggtcaaactctacagccaaagaacagataatggcatttgtaagatgttgcacaatggcttccaaaaggcaaacggccctcacgtccaagtggacgtaaaggctaaacccttcagggtgaatctcctctataaacattccagcaccttcaaccatgcccaaataattctcatctcgccaccttctcaatatatctctaagcaaatcccgaatattaagtccggccattgtaaaaatctgctccagagcgccctccaccttcagcctcaagcagcgaatcatgattgcaaaaattcaggttcctcacagacctgtataagattcaaaagcggaacattaacaaaaataccgcgatcccgtaggtcccttcgcagggccagctgaacataatcgtgcaggtctgcacggaccagcgcggccacttccccgccaggaaccatgacaaaagaacccacactgattatgacacgcatactcggagctatgctaaccagcgtagccccgatgtaagcttgttgcatgggcggcgatataaaatgcaaggtgctgctcaaaaaatcaggcaaagcctcgcgcaaaaaagaaagcacatcgtagtcatgctcatgcagataaaggcaggtaagctccggaaccaccacagaaaaagacaccatttttctctcaaacatgtctgcgggtttctgcataaacacaaaataaaataacaaaaaaacatttaaacattagaagcctgtcttacaacaggaaaaacaacccttataagcataagacggactacggccatgccggcgtgaccgtaaaaaaactggtcaccgtgattaaaaagcaccaccgacagctcctcggtcatgtccggagtcataatgtaagactcggtaaacacatcaggttgattcacatcggtcagtgctaaaaagcgaccgaaatagcccgggggaatacatacccgcaggcgtagagacaacattacagcccccataggaggtataacaaaattaataggagagaaaaacacataaacacctgaaaaaccctcctgcctaggcaaaatagcaccctcccgctccagaacaacatacagcgcttccacagcggcagccataacagtcagccttaccagtaaaaaagaaaacctattaaaaaaacaccactcgacacggcaccagctcaatcagtcacagtgtaaaaaagggccaagtgcagagcgagtatatataggactaaaaaatgacgtaacggttaaagtccacaaaaaacacccagaaaaccgcacgcgaacctacgcccagaaacgaaagccaaaaaacccacaacttcctcaaatcgtcacttccgttttcccacgttacgtcacttcccattttaagaaaactacaattcccaacacatacaagttactccgcccttaattaaatcggatccgatatctagatgtattcgcgaggtaccgagctcgaattctctggccgtcgttttacaacgtcgtgactgggaaaaccctggcgttacccaacttaatcgccttgcagcacatccccctttcgccagctggcgtaatagcgaagaggcccgcaccgatcgcccttcccaacagttgcgcagcctgaatggcgaatggcgcctgatgcggtattttctccttacgcatctgtgcggtatttcacaccgcatatggtgcactctcagtacaatctgctctgatgccgcatagttaagccagccccgacacccgccaacacccgctgacgcgccctgacgggcttgtctgctcccggcatccgcttacagacaagctgtgaccgtctccgggagctgcatgtgtcagaggttttcaccgtcatcaccgaaacgcgcga

SEQ ID NO: 59 - DNA, 14379 bp, Artificial Sequence
  Description of Artificial Sequence: Synthetic polynucleotide
tgcagctctggcccgtgtctcaaaatctctgatgttacattgcacaagataaaaatatatcatcatgaacaataaaactgtctgcttacataaacagtaatacaaggggtgttatgagccatattcaacgggaaacgtcgaggccgcgattaaattccaacatggatgctgatttatatgggtataaatgggctcgcgataatgtcgggcaatcaggtgcgacaatctatcgcttgtatgggaagcccgatgcgccagagttgtttctgaaacatggcaaaggtagcgttgccaatgatgttacagatgagatggtcagactaaactggctgacggaatttatgcctcttccgaccatcaagcattttatccgtactcctgatgatgcatggttactcaccactgcgatccccggaaaaacagcattccaggtattagaagaatatcctgattcaggtgaaaatattgttgatgcgctggcagtgttcctgcgccggttgcattcgattcctgtttgtaattgtccttttaacagcgatcgcgtatttcgtctcgctcaggcgcaatcacgaatgaataacggtttggttgatgcgagtgattttgatgacgagcgtaatggctggcctgttgaacaagtctggaaagaaatgcataaacttttgccattctcaccggattcagtcgtcactcatggtgatttctcacttgataaccttatttttgacgaggggaaattaataggttgtattgatgttggacgagtcggaatcgcagaccgataccaggatcttgccatcctatggaactgcctcggtgagttttctccttcattacagaaacggctttttcaaaaatatggtattgataatcctgatatgaataaattgcagtttcatttgatgctcgatgagtttttctaatcagaattggttaattggttgtaacattattcagattgggcttgatttaaaacttcatttttaatttaaaaggatctaggtgaagatcctttttgataatctcatgaccaaaatcccttaacgtgagttttcgttccactgagcgtcagaccccgtagaaaagatcaaaggatcttcttgagatcctttttttctgcgcgtaatctgctgcttgcaaacaaaaaaaccaccgctaccagcggtggtttgtttgccggatcaagagctaccaactctttttccgaaggtaactggcttcagcagagcgcagataccaaatactgttcttctagtgtagccgtagttaggccaccacttcaagaactctgtagcaccgcctacatacctcgctctgctaatcctgttaccagtggctgctgccagtggcgataagtcgtgtcttaccgggttggactcaagacgatagttaccggataaggcgcagcggtcgggctgaacggggggttcgtgcacacagcccagcttggagcgaacgacctacaccgaactgagatacctacagcgtgagctatgagaaagcgccacgcttcccgaagggagaaaggcggacaggtatccggtaagcggcagggtcggaacaggagagcgcacgagggagcttccagggggaaacgcctggtatctttatagtcctgtcgggtttcgccacctctgacttgagcgtcgatttttgtgatgctcgtcaggggggcggagcctatggaaaaacgccagcaacgcggcctttttacggttcctggccttttgctggccttttgctcacatgttctttcctgcgttatcccctgattctgtggataaccgtattaccgcctttgagtgagctgataccgctcgccgcagccgaacgaccgagcgcagcgagtcagtgagcgaggaagcggaagagcgcccaatacgcaaaccgcctctccccgcgcgttggccgattcattaatgcagctggcacgacaggtttcccgactggaaagcgggcagtgagcgcaacgcaattaatgtgagttagctcactcattaggcaccccaggctttacactttatgcttccggctcgtatgttgtgtggaattgtgagcggataacaatttcacacaggaaacagctatgaccatgattacaccaagcttgcatgcaggcctatccgtagatgtacctggacatccaggtgatgccggcggcggtggtggaggcgcgcggaaagtcgcggacgcggttccagatgttgcgcagcggcaaaaagtgctccatggtcgggacgctctggccggtgaggcgtgcgcagtcgttgacgctctagaccgtgcaaaaggagagcctgtaagcgggcactcttccgtggtctggtggataaattcgcaagggtatcatggcggacgaccggggttcgaaccccggatccggccgtccgccgtgatccatgcggttaccgcccgcgtgtcgaacccaggtgtgcgacgtcagacaacgggggagcgctccttttggcttccttccaggcgcggcggctgctgcgctagcttttttggccactggccgcgcgcggcgtaagcggttaggctggaaagcgaaagcattaagtggctcgctccctgtagccggagggttattttccaagggttgagtcgcaggacccccggttcgagtctcgggccggccggactgcggcgaacgggggtttgcctccccgtcatgcaagaccccgcttgcaaattcctccggaaacagggacgagccccttttttgcttttcccagatgcatccggtgctgcggcagatgcgcccccctcctcagcagcggcaagagcaagagcagcggcagacatgcagggcaccctccccttctcctaccgcgtcaggaggggcaacatctgtacactctcgggtgattatttacccccacccttgccgtctgcgccgtttaaaaatcaaaggggttctgccgcgcatcgctatgcgccactggcagggacacgttgcgatactggtgtttagtgctccacttaaactcaggcacaaccatccgcggcagctcggtgaagttttcactccacaggctgcgcaccatcaccaacgcgtttagcaggtcgggcgccgatatcttgaagtcgcagttggggcctccgccctgcgcgcgcgagttgcgatacacagggttgcagcactggaacactatcagcgccgggtggtgcacgctggccagcacgctcttgtcggagatcagatccgcgtccaggtcctccgcgttgctcagggcgaacggagtcaactttggtagctgccttcccaaaaagggcgcgtgcccaggctttgagttgcactcgcaccgtagtggcatcaaaaggtgaccgtgcccggtctgggcgttaggatacagcgcctgcataaaagccttgatctgcttaaaagccacctgagcctttgcgccttcagagaagaacatgccgcaagacttgccggaaaactgattggccggacaggccgcgtcgtgcacgcagcaccttgcgtcggtgttggagatctgcaccacatttcggccccaccggttcttcacgatcttggccttgctagactgctccttcagcgcgcgctgcccgttttcgctcgtcacatccatttcaatcacgtgctccttatttatcataatgcttccgtgtagacacttaagctcgccttcgatctcagcgcagcggtgcagccacaacgcgcagcccgtgggctcgtgatgcttgtaggtcacctctgcaaacgactgcaggtacgcctgcaggaatcgccccatcatcgtcacaaaggtcttgttgctggtgaaggtcagctgcaacccgcggtgctcctcgttcagccaggtcttgcatacggccgccagagcttccacttggtcaggcagtagtttgaagttcgcctttagatcgttatccacgtggtacttgtccatcagcgcgcgcgcagcctccatgcccttctcccacgcagacacgatcggcacactcagcgggttcatcaccgtaatttcactttccgcttcgctgggctcttcctcttcctcttgcgtccgcataccacgcgccactgggtcgtcttcattcagccgccgcactgtgcgcttacctcctttgccatgcttgattagcaccggtgggttgctgaaacccaccatttgtagcgccacatcttctctttcttcctcgctgtccacgattacctctggtgatggcgggcgctcgggcttgggagaagggcgcttctttttcttcttgggcgcaatggccaaatccgccgccgaggtcgatggccgcgggctgggtgtgcgcggcaccagcgcgtcttgtgatgagtcttcctcgtcctcggactcgatacgccgcctcatccgcttttttgggggcgcccggggaggcggcggcgacggggacggggacgacacgtcctccatggttgggggacgtcgcgccgcaccgcgtccgcgctcgggggtggtttcgcgctgctcctcttcccgactggccatttccttctcctataggcagaaaaagatccacaaaagcgaagatcagcttcggcgcacgctggaagacgcggaggctctcttcagtaaatactgcgcgctgactcttaaggactagtttcgcgccctttctcaaatttaagcgcgaaaactacgtcatctccagcggccacacccggcgccagcacctgttgtcagcgccattggcgcgcccgcccgccgcgcgcttcgctttttatagggccgccgccgccgccgcctcgccataaaaggaaactttcggagcgcgccgctctgattggctgccgccgcacctctccgcctcgccccgccccgcccctcgccccgccccgccccgcctggcgcgcgccccccccccccccccgcccccatcgctgcacaaaataattaaaaaataaataaatacaaaattgggggtggggaggggggggagatggggagagtgaagcagaacgtggggctcacctcgaggccggccgaatatcttcatttaaatgtgtgtcagttagggtgtggaaagtccccaggctccccagcaggcagaagtatgcaaagcatgcatctcaattagtcagcaaccaggtgtggaaagtccccaggctccccagcaggcagaagtatgcaaagcatgcatctcaattagtcagcaaccatagtcccgcccctaactccgcccatcccgcccctaactccgcccagttccgcccattctccgccccatggctgactaattttttttatttatgcagaggccgaggccgcctcggcctctgagctattccagaagtagtgaggaggcttttttggaggcctaggcttttgcaaacgccggcgcaccgcgggcccgatccaccggtactgttggtaaagccaccatgttttccggtggcggcggcccgctgtcccccggaggaaagtcggcggccagggcggcgtccgggttttttgcgcccgccggccctcgcggagccagccggggacccccgccttgtttgaggcaaaacttttacaacccctacctcgccccagtcgggacgcaacagaagccgaccgggccaacccagcgccatacgtactatagcgaatgcgatgaatttcgattcatcgccccgcgggtgctggacgaggatgcccccccggagaagcgcgccggggtgcacgacggtcacctcaagcgcgcccccaaggtgtactgcgggggggacgagcgcgacgtcctccgcgtcgggtcgggcggcttctggccgcggcgctcgcgcctgtggggcggcgtggaccacgccccggcggggttcaaccccaccgtcaccgtctttcacgtgtacgacatcctggagaacgtggagcacgcgtacggcatgcgcgcggcccagttccacgcgcggtttatggacgccatcacaccgacggggaccgtcatcacgctcctgggcctgactccggaaggccaccgggtggccgttcacgtttacggcacgcggcagtacttttacatgaacaaggaggaggtcgacaggcacctacaatgccgcgccccacgagatctctgcgagcgcatggccgcggccctgcgcgagtccccgggcgcgtcgttccgcggcatctccgcggaccacttcgaggcggaggtggtggagcgcaccgacgtgtactactacgagacgcgccccgctctgttttaccgcgtctacgtccgaagcgggcgcgtgctgtcgtacctgtgcgacaacttctgcccggccatcaagaagtacgagggtggggtcgacgccaccacccggttcatcctggacaaccccgggttcgtcaccttcggctggtaccgtctcaaaccgggccggaacaacacgctagcccagccgcgggccccgatggccttcgggacatccagcgacgtcgagtttaactgtacggcggacaacctggccatcgaggggggcatgagcgacctaccggcatacaagctcatgtgcttcgatatcgaatgcaaggcggggggggaggacgagctggcctttccggtggccgggcacccggaggacctggtcatccagatatcctgtctgctctacgacctgtccaccaccgccctggagcacgtcctcctgttttcgctcggttcctgcgacctccccgaatcccacctgaacgagctggcggccaggggcctgcccacgcccgtggttctggaattcgacagcgaattcgagatgctgttggccttcatgacccttgtgaaacagtacggccccgagttcgtgaccgggtacaacatcatcaacttcgactggcccttcttgctggccaagctgacggacatttacaaggtccccctggacgggtacggccgcatgaacggccggggcgtgtttcgcgtgtgggacataggccagagccacttccagaagcgcagcaagataaaggtgaacggcatggtgaacatcgacatgtacgggattataaccgacaagatcaagctctcgagctacaagctcaacgccgtggccgaagccgtcctgaaggacaagaagaaggacctgagctatcgcgacatccccgcctactacgccgccgggcccgcgcaacgcggggtgatcggcgagtactgcatacaggattccctgctggtgggccagctgttttttaagtttttgccccatctggagctctcggccgtcgcgcgcttggcgggtattaacatcacccgcaccatctacgacggccagcagatccgcgtctttacgtgcctgctgcgcctggccgaccagaagggctttattctgccggacacccaggggcgatttaggggcgccgggggggaggcgcccaagcgtccggccgcagcccgggaggacgaggagcggccagaggaggagggggaggacgaggacgaacgcgaggagggcgggggcgagcgggagccggagggcgcgcgggagaccgccggcaggcacgtggggtaccagggggccagggtccttgaccccacttccgggtttcacgtgaaccccgtggtggtgttcgactttgccagcctgtaccccagcatcatccaggcccacaacctgtgcttcagcacgctctccctgagggccgacgcagtggcgcacctggaggcgggcaaggactacctggagatcgaggtgggggggcgacggctgttcttcgtcaaggctcacgtgcgagagagcctcctcagcatcctcctgcgggactggctcgccatgcgaaagcagatccgctcgcggattccccagagcagccccgaggaggccgtgctcctggacaagcagcaggccgccatcaaggtcgtgtgtaactcggtgtacgggttcacgggagtgcagcacggactcctgccgtgcctgcacgttgccgcgacggtgacgaccatcggccgcgagatgctgctcgcgacccgcgagtacgtccacgcgcgctgggcggccttcgaacagctcctggccgatttcccggaggcggccgacatgcgcgcccccgggccctattccatgcgcatcatctacggggacacggactccatctttgtgctgtgccgcggcctcacggccgccgggctgacggccgtgggcgacaagatggcgagccacatctcgcgcgcgctgtttctgccccccatcaaactcgagtgcgaaaagacgttcaccaagctgctgctgatcgccaagaaaaagtacatcggcgtcatctacgggggtaagatgctcatcaagggcgtggatctggtgcgcaaaaacaactgcgcgtttatcaaccgcacctccagggccctggtcgacctgctgttttacgacgataccgtctccggagccgccgcggcgttagccgagcgccccgcggaggagtggctggcgcgacccctgcccgagggactgcaggcgttcggggccgtcctcgtagacgcccatcggcgcatcaccgacccggagagggacatccaggactttgtcctcaccgccgaactgagcagacacccgcgcgcgtacaccaacaagcgcctggcccacctgacggtgtattacaagctcatggcccgccgcgcgcaggtcccgtccatcaaggaccggatcccgtacgtgatcgtggcccagacccgcgaggtagaggagacggtcgcgcggctggccgccctccgcgagctagacgccgccgccccaggggacgagcccgccccccccgcggccctgccctccccggccaagcgcccccgggagacgccgtcgcctgccgaccccccgggaggcgcgtccaagccccgcaagctgctggtgtccgagctggccgaggatcccgcatacgccattgcccacggcgtcgccctgaacacggactattacttctcccacctgttgggggcggcgtgcgtgacattcaaggccctgtttgggaataacgccaagatcaccgagagtctgttaaaaaggtttattcccgaagtgtggcaccccccggacgacgtggccgcgcggctccggaccgcagggttcggggcggtgggtgccggcgctacggcggaggaaactcgtcgaatgttgcatagagcctttgatactctagcagaattcggcagtggagcaacaaacttctctctgctgaaacaagccggagatgtcgaagagaatcctggaccgacggattcccctggcggtgtggcccccgcctcccccgtggaggacgcgtcggacgcgtccctcgggcagccggaggagggggcgccctgccaggtggtcctgcagggcgccgaacttaatggaatcctacaggcgtttgccccgctgcgcacgagccttctggactcgcttctggttatgggcgaccggggcatccttatccataacacgatctttggggagcaggtgttcctgcccctggaacactcgcaattcagtcggtatcgctggcgcggacccacggcggcgttcctgtctctcgtggaccagaagcgctccctcctgagcgtgtttcgcgccaaccagtacccggacctacgtcgggtggagttggcgatcacgggccaggccccgtttcgcacgctggttcagcgcatatggacgacgacgtccgacggcgaggccgttgagctagccagcgagacgctgatgaagcgcgaactgacgagctttgtggtgctggttccccagggaacccccgacgttcagttgcgcctgacgaggccgcagctcaccaaggtccttaacgcgaccggggccgatagtgccacgcccaccacgttcgagctcggggttaacggcaaattttccgtgttcaccacgagtacctgcgtcacctttgctgcccgcgaggagggcgtgtcgtccagcaccagcacccaggtccagatcctgtccaacgcgctcaccaaggcgggccaggccgccgcgaacgccaagacggtgtacggggaaaatacccatcgcaccttctctgtggtcgtcgacgattgcagcatgcgggcggtgctccggcgactgcaggtcggcgggggcaccctcaagttcttcctcacgacccccgtccccagtctgtgcgtcaccgccaccggtcccaacgcggtatcggcggtatttctcctgaaaccccagaagatttgcctggactggctgggtcatagccaggggtctccttcagccgggagctcggcctcccgggcctctgggagcgagccaacagacagccaggactccgcgtcggacgcggtcagccacggcgatccggaagacctcgatggcgctgcccgggcgggagaggcgggggccttgcatgcctgtccgatgccgtcgtcgaccacgcgggtcactcccacgaccaagcgggggcgctcggggggcgaggatgcgcgcgcggacacggccctaaagaaacctaagacggggtcgcccaccgcacccccgcccgcagatccagtccccctggacacggaggacgactccgatgcggcggacgggacggcggcccgtcccgccgctccagacgcccggagcggaagccgttacgcgtgttactttcgcgacctcccgaccggagaagcaagccccggcgccttctccgccttccgggggggcccccaaaccccgtatggttttggattcccctgataggatccgactgcaggtagctgtgccttctagttgccagccatctgttgtttgcccctcccccgtgccttccttgaccctggaaggtgccactcccactgtcctttcctaataaaatgaggaaattgcatcgcattgtctgagtaggtgtcattctattctggggggtggggtggggcaggacagcaagggggaggattgggaagacaatagcaggcatgctggggatgcggtgggctctatgggtttaaacatcgatgcggccgccgtttgtgttatgtttcaacgtgtttatttttcaattgcagaaaatttcaagtcatttttcattcagtagtatagccccaccaccacatagcttatacagatcaccgtaccttaatcaaactcacagaaccctagtattcaacctgccacctccctcccaacacacagagtacacagtcctttctccccggctggccttaaaaagcatcatatcatgggtaacagacatattcttaggtgttatattccacacggtttcctgtcgagccaaacgctcatcagtgatattaataaactccccgggcagctcacttaagttcatgtcgctgtccagctgctgagccacaggctgctgtccaacttgcggttgcttaacgggcggcgaaggagaagtccacgcctacatgggggtagagtcataatcgtgcatcaggatagggcggtggtgctgcagcagcgcgcgaataaactgctgccgccgccgctccgtcctgcaggaatacaacatggcagtggtctcctcagcgatgattcgcaccgcccgcagcataaggcgccttgtcctccgggcacagcagcgcaccctgatctcacttaaatcagcacagtaactgcagcacagcaccacaatattgttcaaaatcccacagtgcaaggcgctgtatccaaagctcatggcggggaccacagaacccacgtggccatcataccacaagcgcaggtagattaagtggcgacccctcataaacacgctggacataaacattacctcttttggcatgttgtaattcaccacctcccggtaccatataaacctctgattaaacatggcgccatccaccaccatcctaaaccagctggccaaaacctgcccgccggctatacactgcagggaaccgggactggaacaatgacagtggagagcccaggactcgtaaccatggatcatcatgctcgtcatgatatcaatgttggcacaacacaggcacacgtgcatacacttcctcaggattacaagctcctcccgcgttagaaccatatcccagggaacaacccattcctgaatcagcgtaaatcccacactgcagggaagacctcgcacgtaactcacgttgtgcattgtcaaagtgttacattcgggcagcagcggatgatcctccagtatggtagcgcgggtttctgtctcaaaaggaggtagacgatccctactgtacggagtgcgccgagacaaccgagatcgtgttggtcgtagtgtcatgccaaatggaacgccggacgtagtcatatttcctgaagcaaaaccaggtgcgggcgtgacaaacagatctgcgtctccggtctcgccgcttagatcgctctgtgtagtagttgtagtatatccactctctcaaagcatccaggcgccccctggcttcgggttctatgtaaactccttcatgcgccgctgccctgataacatccaccaccgcagaataagccacacccagccaacctacacattcgttctgcgagtcacacacgggaggagcgggaagagctggaagaaccatgtttttttttttattccaaaagattatccaaaacctcaaaatgaagatctattaagtgaacgcgctcccctccggtggcgtggtcaaactctacagccaaagaacagataatggcatttgtaagatgttgcacaatggcttccaaaaggcaaacggccctcacgtccaagtggacgtaaaggctaaacccttcagggtgaatctcctctataaacattccagcaccttcaaccatgcccaaataattctcatctcgccaccttctcaatatatctctaagcaaatcccgaatattaagtccggccattgtaaaaatctgctccagagcgccctccaccttcagcctcaagcagcgaatcatgattgcaaaaattcaggttcctcacagacctgtataagattcaaaagcggaacattaacaaaaataccgcgatcccgtaggtcccttcgcagggccagctgaacataatcgtgcaggtctgcacggaccagcgcggccacttccccgccaggaaccatgacaaaagaacccacactgattatgacacgcatactcggagctatgctaaccagcgtagccccgatgtaagcttgttgcatgggcggcgatataaaatgcaaggtgctgctcaaaaaatcaggcaaagcctcgcgcaaaaaagaaagcacatcgtagtcatgctcatgcagataaaggcaggtaagctccggaaccaccacagaaaaagacaccatttttctctcaaacatgtctgcgggtttctgcataaacacaaaataaaataacaaaaaaacatttaaacattagaagcctgtcttacaacaggaaaaacaacccttataagcataagacggactacggccatgccggcgtgaccgtaaaaaaactggtcaccgtgattaaaaagcaccaccgacagctcctcggtcatgtccggagtcataatgtaagactcggtaaacacatcaggttgattcacatcggtcagtgctaaaaagcgaccgaaatagcccgggggaatacatacccgcaggcgtagagacaacattacagcccccataggaggtataacaaaattaataggagagaaaaacacataaacacctgaaaaaccctcctgcctaggcaaaatagcaccctcccgctccagaacaacatacagcgcttccacagcggcagccataacagtcagccttaccagtaaaaaagaaaacctattaaaaaaacaccactcgacacggcaccagctcaatcagtcacagtgtaaaaaagggccaagtgcagagcgagtatatataggactaaaaaatgacgtaacggttaaagtccacaaaaaacacccagaaaaccgcacgcgaacctacgcccagaaacgaaagccaaaaaacccacaacttcctcaaatcgtcacttccgttttcccacgttacgtcacttcccattttaagaaaactacaattcccaacacatacaagttactccgcccttaattaaatcggatccgatatctagatgtattcgcgaggtaccgagctcgaattctctggccgtcgttttacaacgtcgtgactgggaaaaccctggcgttacccaacttaatcgccttgcagcacatccccctttcgccagctggcgtaatagcgaagaggcccgcaccgatcgcccttcccaacagttgcgcagcctgaatggcgaatggcgcctgatgcggtattttctccttacgcatctgtgcggtatttcacaccgcatatggtgcactctcagtacaatctgctctgatgccgcatagttaagccagccccgacacccgccaacacccgctgacgcgccctgacgggcttgtctgctcccggcatccgcttacagacaagctgtgaccgtctccgggagctgcatgtgtcagaggttttcaccgtcatcaccgaaacgcgcga

SEQ ID NO: 60 - DNA, 14514 bp, Artificial Sequence
  Description of Artificial Sequence: Synthetic polynucleotide
tgcagctctggcccgtgtctcaaaatctctgatgttacattgcacaagataaaaatatatcatcatgaacaataaaactgtctgcttacataaacagtaatacaaggggtgttatgagccatattcaacgggaaacgtcgaggccgcgattaaattccaacatggatgctgatttatatgggtataaatgggctcgcgataatgtcgggcaatcaggtgcgacaatctatcgcttgtatgggaagcccgatgcgccagagttgtttctgaaacatggcaaaggtagcgttgccaatgatgttacagatgagatggtcagactaaactggctgacggaatttatgcctcttccgaccatcaagcattttatccgtactcctgatgatgcatggttactcaccactgcgatccccggaaaaacagcattccaggtattagaagaatatcctgattcaggtgaaaatattgttgatgcgctggcagtgttcctgcgccggttgcattcgattcctgtttgtaattgtccttttaacagcgatcgcgtatttcgtctcgctcaggcgcaatcacgaatgaataacggtttggttgatgcgagtgattttgatgacgagcgtaatggctggcctgttgaacaagtctggaaagaaatgcataaacttttgccattctcaccggattcagtcgtcactcatggtgatttctcacttgataaccttatttttgacgaggggaaattaataggttgtattgatgttggacgagtcggaatcgcagaccgataccaggatcttgccatcctatggaactgcctcggtgagttttctccttcattacagaaacggctttttcaaaaatatggtattgataatcctgatatgaataaattgcagtttcatttgatgctcgatgagtttttctaatcagaattggttaattggttgtaacattattcagattgggcttgatttaaaacttcatttttaatttaaaaggatctaggtgaagatcctttttgataatctcatgaccaaaatcccttaacgtgagttttcgttccactgagcgtcagaccccgtagaaaagatcaaaggatcttcttgagatcctttttttctgcgcgtaatctgctgcttgcaaacaaaaaaaccaccgctaccagcggtggtttgtttgccggatcaagagctaccaactctttttccgaaggtaactggcttcagcagagcgcagataccaaatactgttcttctagtgtagccgtagttaggccaccacttcaagaactctgtagcaccgcctacatacctcgctctgctaatcctgttaccagtggctgctgccagtggcgataagtcgtgtcttaccgggttggactcaagacgatagttaccggataaggcgcagcggtcgggctgaacggggggttcgtgcacacagcccagcttggagcgaacgacctacaccgaactgagatacctacagcgtgagctatgagaaagcgccacgcttcccgaagggagaaaggcggacaggtatccggtaagcggcagggtcggaacaggagagcgcacgagggagcttccagggggaaacgcctggtatctttatagtcctgtcgggtttcgccacctctgacttgagcgtcgatttttgtgatgctcgtcaggggggcggagcctatggaaaaacgccagcaacgcggcctttttacggttcctggccttttgctggccttttgctcacatgttctttcctgcgttatcccctgattctgtggataaccgtattaccgcctttgagtgagctgataccgctcgccgcagccgaacgaccgagcgcagcgagtcagtgagcgaggaagcggaagagcgcccaatacgcaaaccgcctctccccgcgcgttggccgattcattaatgcagctggcacgacaggtttcccgactggaaagcgggcagtgagcgcaacgcaattaatgtgagttagctcactcattaggcaccccaggctttacactttatgcttccggctcgtatgttgtgtggaattgtgagcggataacaatttcacacaggaaacagctatgaccatgattacaccaagcttgcatgcaggcctatccgtagatgtacctggacatccaggtgatgccggcggcggtggtggaggcgcgcggaaagtcgcggacgcggttccagatgttgcgcagcggcaaaaagtgctccatggtcgggacgctctggccggtgaggcgtgcgcagtcgttgacgctctagaccgtgcaaaaggagagcctgtaagcgggcactcttccgtggtctggtggataaattcgcaagggtatcatggcggacgaccggggttcgaaccccggatccggccgtccgccgtgatccatgcggttaccgcccgcgtgtcgaacccaggtgtgcgacgtcagacaacgggggagcgctccttttggcttccttccaggcgcggcggctgctgcgctagcttttttggccactggccgcgcgcggcgtaagcggttaggctggaaagcgaaagcattaagtggctcgctccctgtagccggagggttattttccaagggttgagtcgcaggacccccggttcgagtctcgggccggccggactgcggcgaacgggggtttgcctccccgtcatgcaagaccccgcttgcaaattcctccggaaacagggacgagccccttttttgcttttcccagatgcatccggtgctgcggcagatgcgcccccctcctcagcagcggcaagagcaagagcagcggcagacatgcagggcaccctccccttctcctaccgcgtcaggaggggcaacatcgatccagacatgataagatacattgatgagtttggacaaaccacaactagaatgcagtgaaaaaaatgctttatttgtgaaatttgtgatgctattgctttatttgtaaccattataagctgcaataaacaagtttgtacactctcgggtgattatttacccccacccttgccgtctgcgccgtttaaaaatcaaaggggttctgccgcgcatcgctatgcgccactggcagggacacgttgcgatactggtgtttagtgctccacttaaactcaggcacaaccatccgcggcagctcggtgaagttttcactccacaggctgcgcaccatcaccaacgcgtttagcaggtcgggcgccgatatcttgaagtcgcagttggggcctccgccctgcgcgcgcgagttgcgatacacagggttgcagcactggaacactatcagcgccgggtggtgcacgctggccagcacgctcttgtcggagatcagatccgcgtccaggtcctccgcgttgctcagggcgaacggagtcaactttggtagctgccttcccaaaaagggcgcgtgcccaggctttgagttgcactcgcaccgtagtggcatcaaaaggtgaccgtgcccggtctgggcgttaggatacagcgcctgcataaaagccttgatctgcttaaaagccacctgagcctttgcgccttcagagaagaacatgccgcaagacttgccggaaaactgattggccggacaggccgcgtcgtgcacgcagcaccttgcgtcggtgttggagatctgcaccacatttcggccccaccggttcttcacgatcttggccttgctagactgctccttcagcgcgcgctgcccgttttcgctcgtcacatccatttcaatcacgtgctccttatttatcataatgcttccgtgtagacacttaagctcgccttcgatctcagcgcagcggtgcagccacaacgcgcagcccgtgggctcgtgatgcttgtaggtcacctctgcaaacgactgcaggtacgcctgcaggaatcgccccatcatcgtcacaaaggtcttgttgctggtgaaggtcagctgcaacccgcggtgctcctcgttcagccaggtcttgcatacggccgccagagcttccacttggtcaggcagtagtttgaagttcgcctttagatcgttatccacgtggtacttgtccatcagcgcgcgcgcagcctccatgcccttctcccacgcagacacgatcggcacactcagcgggttcatcaccgtaatttcactttccgcttcgctgggctcttcctcttcctcttgcgtccgcataccacgcgccactgggtcgtcttcattcagccgccgcactgtgcgcttacctcctttgccatgcttgattagcaccggtgggttgctgaaacccaccatttgtagcgccacatcttctctttcttcctcgctgtccacgattacctctggtgatggcgggcgctcgggcttgggagaagggcgcttctttttcttcttgggcgcaatggccaaatccgccgccgaggtcgatggccgcgggctgggtgtgcgcggcaccagcgcgtcttgtgatgagtcttcctcgtcctcggactcgatacgccgcctcatccgcttttttgggggcgcccggggaggcggcggcgacggggacggggacgacacgtcctccatggttgggggacgtcgcgccgcaccgcgtccgcgctcgggggtggtttcgcgctgctcctcttcccgactggccatttccttctcctataggcagaaaaagatccacaaaagcgaagatcagcttcggcgcacgctggaagacgcggaggctctcttcagtaaatactgcgcgctgactcttaaggactagtttcgcgccctttctcaaatttaagcgcgaaaactacgtcatctccagcggccacacccggcgccagcacctgttgtcagcgccattggcgcgcccgcccgccgcgcgcttcgctttttatagggccgccgccgccgccgcctcgccataaaaggaaactttcggagcgcgccgctctgattggctgccgccgcacctctccgcctcgccccgccccgcccctcgccccgccccgccccgcctggcgcgcgccccccccccccccccgcccccatcgctgcacaaaataattaaaaaataaataaatacaaaattgggggtggggaggggggggagatggggagagtgaagcagaacgtggggctcacctcgaggccggccgaatatcttcatttaaatgtgtgtcagttagggtgtggaaagtccccaggctccccagcaggcagaagtatgcaaagcatgcatctcaattagtcagcaaccaggtgtggaaagtccccaggctccccagcaggcagaagtatgcaaagcatgcatctcaattagtcagcaaccatagtcccgcccctaactccgcccatcccgcccctaactccgcccagttccgcccattctccgccccatggctgactaattttttttatttatgcagaggccgaggccgcctcggcctctgagctattccagaagtagtgaggaggcttttttggaggcctaggcttttgcaaacgccggcgcaccgcgggcccgatccaccggtactgttggtaaagccaccatgttttccggtggcggcggcccgctgtcccccggaggaaagtcggcggccagggcggcgtccgggttttttgcgcccgccggccctcgcggagccagccggggacccccgccttgtttgaggcaaaacttttacaacccctacctcgccccagtcgggacgcaacagaagccgaccgggccaacccagcgccatacgtactatagcgaatgcgatgaatttcgattcatcgccccgcgggtgctggacgaggatgcccccccggagaagcgcgccggggtgcacgacggtcacctcaagcgcgcccccaaggtgtactgcgggggggacgagcgcgacgtcctccgcgtcgggtcgggcggcttctggccgcggcgctcgcgcctgtggggcggcgtggaccacgccccggcggggttcaaccccaccgtcaccgtctttcacgtgtacgacatcctggagaacgtggagcacgcgtacggcatgcgcgcggcccagttccacgcgcggtttatggacgccatcacaccgacggggaccgtcatcacgctcctgggcctgactccggaaggccaccgggtggccgttcacgtttacggcacgcggcagtacttttacatgaacaaggaggaggtcgacaggcacctacaatgccgcgccccacgagatctctgcgagcgcatggccgcggccctgcgcgagtccccgggcgcgtcgttccgcggcatctccgcggaccacttcgaggcggaggtggtggagcgcaccgacgtgtactactacgagacgcgccccgctctgttttaccgcgtctacgtccgaagcgggcgcgtgctgtcgtacctgtgcgacaacttctgcccggccatcaagaagtacgagggtggggtcgacgccaccacccggttcatcctggacaaccccgggttcgtcaccttcggctggtaccgtctcaaaccgggccggaacaacacgctagcccagccgcgggccccgatggccttcgggacatccagcgacgtcgagtttaactgtacggcggacaacctggccatcgaggggggcatgagcgacctaccggcatacaagctcatgtgcttcgatatcgaatgcaaggcggggggggaggacgagctggcctttccggtggccgggcacccggaggacctggtcatccagatatcctgtctgctctacgacctgtccaccaccgccctggagcacgtcctcctgttttcgctcggttcctgcgacctccccgaatcccacctgaacgagctggcggccaggggcctgcccacgcccgtggttctggaattcgacagcgaattcgagatgctgttggccttcatgacccttgtgaaacagtacggccccgagttcgtgaccgggtacaacatcatcaacttcgactggcccttcttgctggccaagctgacggacatttacaaggtccccctggacgggtacggccgcatgaacggccggggcgtgtttcgcgtgtgggacataggccagagccacttccagaagcgcagcaagataaaggtgaacggcatggtgaacatcgacatgtacgggattataaccgacaagatcaagctctcgagctacaagctcaacgccgtggccgaagccgtcctgaaggacaagaagaaggacctgagctatcgcgacatccccgcctactacgccgccgggcccgcgcaacgcggggtgatcggcgagtactgcatacaggattccctgctggtgggccagctgttttttaagtttttgccccatctggagctctcggccgtcgcgcgcttggcgggtattaacatcacccgcaccatctacgacggccagcagatccgcgtctttacgtgcctgctgcgcctggccgaccagaagggctttattctgccggacacccaggggcgatttaggggcgccgggggggaggcgcccaagcgtccggccgcagcccgggaggacgaggagcggccagaggaggagggggaggacgaggacgaacgcgaggagggcgggggcgagcgggagccggagggcgcgcgggagaccgccggcaggcacgtggggtaccagggggccagggtccttgaccccacttccgggtttcacgtgaaccccgtggtggtgttcgactttgccagcctgtaccccagcatcatccaggcccacaacctgtgcttcagcacgctctccctgagggccgacgcagtggcgcacctggaggcgggcaaggactacctggagatcgaggtgggggggcgacggctgttcttcgtcaaggctcacgtgcgagagagcctcctcagcatcctcctgcgggactggctcgccatgcgaaagcagatccgctcgcggattccccagagcagccccgaggaggccgtgctcctggacaagcagcaggccgccatcaaggtcgtgtgtaactcggtgtacgggttcacgggagtgcagcacggactcctgccgtgcctgcacgttgccgcgacggtgacgaccatcggccgcgagatgctgctcgcgacccgcgagtacgtccacgcgcgctgggcggccttcgaacagctcctggccgatttcccggaggcggccgacatgcgcgcccccgggccctattccatgcgcatcatctacggggacacggactccatctttgtgctgtgccgcggcctcacggccgccgggctgacggccgtgggcgacaagatggcgagccacatctcgcgcgcgctgtttctgccccccatcaaactcgagtgcgaaaagacgttcaccaagctgctgctgatcgccaagaaaaagtacatcggcgtcatctacgggggtaagatgctcatcaagggcgtggatctggtgcgcaaaaacaactgcgcgtttatcaaccgcacctccagggccctggtcgacctgctgttttacgacgataccgtctccggagccgccgcggcgttagccgagcgccccgcggaggagtggctggcgcgacccctgcccgagggactgcaggcgttcggggccgtcctcgtagacgcccatcggcgcatcaccgacccggagagggacatccaggactttgtcctcaccgccgaactgagcagacacccgcgcgcgtacaccaacaagcgcctggcccacctgacggtgtattacaagctcatggcccgccgcgcgcaggtcccgtccatcaaggaccggatcccgtacgtgatcgtggcccagacccgcgaggtagaggagacggtcgcgcggctggccgccctccgcgagctagacgccgccgccccaggggacgagcccgccccccccgcggccctgccctccccggccaagcgcccccgggagacgccgtcgcctgccgaccccccgggaggcgcgtccaagccccgcaagctgctggtgtccgagctggccgaggatcccgcatacgccattgcccacggcgtcgccctgaacacggactattacttctcccacctgttgggggcggcgtgcgtgacattcaaggccctgtttgggaataacgccaagatcaccgagagtctgttaaaaaggtttattcccgaagtgtggcaccccccggacgacgtggccgcgcggctccggaccgcagggttcggggcggtgggtgccggcgctacggcggaggaaactcgtcgaatgttgcatagagcctttgatactctagcagaattcggcagtggagcaacaaacttctctctgctgaaacaagccggagatgtcgaagagaatcctggaccgacggattcccctggcggtgtggcccccgcctcccccgtggaggacgcgtcggacgcgtccctcgggcagccggaggagggggcgccctgccaggtggtcctgcagggcgccgaacttaatggaatcctacaggcgtttgccccgctgcgcacgagccttctggactcgcttctggttatgggcgaccggggcatccttatccataacacgatctttggggagcaggtgttcctgcccctggaacactcgcaattcagtcggtatcgctggcgcggacccacggcggcgttcctgtctctcgtggaccagaagcgctccctcctgagcgtgtttcgcgccaaccagtacccggacctacgtcgggtggagttggcgatcacgggccaggccccgtttcgcacgctggttcagcgcatatggacgacgacgtccgacggcgaggccgttgagctagccagcgagacgctgatgaagcgcgaactgacgagctttgtggtgctggttccccagggaacccccgacgttcagttgcgcctgacgaggccgcagctcaccaaggtccttaacgcgaccggggccgatagtgccacgcccaccacgttcgagctcggggttaacggcaaattttccgtgttcaccacgagtacctgcgtcacctttgctgcccgcgaggagggcgtgtcgtccagcaccagcacccaggtccagatcctgtccaacgcgctcaccaaggcgggccaggccgccgcgaacgccaagacggtgtacggggaaaatacccatcgcaccttctctgtggtcgtcgacgattgcagcatgcgggcggtgctccggcgactgcaggtcggcgggggcaccctcaagttcttcctcacgacccccgtccccagtctgtgcgtcaccgccaccggtcccaacgcggtatcggcggtatttctcctgaaaccccagaagatttgcctggactggctgggtcatagccaggggtctccttcagccgggagctcggcctcccgggcctctgggagcgagccaacagacagccaggactccgcgtcggacgcggtcagccacggcgatccggaagacctcgatggcgctgcccgggcgggagaggcgggggccttgcatgcctgtccgatgccgtcgtcgaccacgcgggtcactcccacgaccaagcgggggcgctcggggggcgaggatgcgcgcgcggacacggccctaaagaaacctaagacggggtcgcccaccgcacccccgcccgcagatccagtccccctggacacggaggacgactccgatgcggcggacgggacggcggcccgtcccgccgctccagacgcccggagcggaagccgttacgcgtgttactttcgcgacctcccgaccggagaagcaagccccggcgccttctccgccttccgggggggcccccaaaccccgtatggttttggattcccctgataggatccgactgcaggtagctgtgccttctagttgccagccatctgttgtttgcccctcccccgtgccttccttgaccctggaaggtgccactcccactgtcctttcctaataaaatgaggaaattgcatcgcattgtctgagtaggtgtcattctattctggggggtggggtggggcaggacagcaagggggaggattgggaagacaatagcaggcatgctggggatgcggtgggctctatgggtttaaacatcgatgcggccgccgtttgtgttatgtttcaacgtgtttatttttcaattgcagaaaatttcaagtcatttttcattcagtagtatagccccaccaccacatagcttatacagatcaccgtaccttaatcaaactcacagaaccctagtattcaacctgccacctccctcccaacacacagagtacacagtcctttctccccggctggccttaaaaagcatcatatcatgggtaacagacatattcttaggtgttatattccacacggtttcctgtcgagccaaacgctcatcagtgatattaataaactccccgggcagctcacttaagttcatgtcgctgtccagctgctgagccacaggctgctgtccaacttgcggttgcttaacgggcggcgaaggagaagtccacgcctacatgggggtagagtcataatcgtgcatcaggatagggcggtggtgctgcagcagcgcgcgaataaactgctgccgccgccgctccgtcctgcaggaatacaacatggcagtggtctcctcagcgatgattcgcaccgcccgcagcataaggcgccttgtcctccgggcacagcagcgcaccctgatctcacttaaatcagcacagtaactgcagcacagcaccacaatattgttcaaaatcccacagtgcaaggcgctgtatccaaagctcatggcggggaccacagaacccacgtggccatcataccacaagcgcaggtagattaagtggcgacccctcataaacacgctggacataaacattacctcttttggcatgttgtaattcaccacctcccggtaccatataaacctctgattaaacatggcgccatccaccaccatcctaaaccagctggccaaaacctgcccgccggctatacactgcagggaaccgggactggaacaatgacagtggagagcccaggactcgtaaccatggatcatcatgctcgtcatgatatcaatgttggcacaacacaggcacacgtgcatacacttcctcaggattacaagctcctcccgcgttagaaccatatcccagggaacaacccattcctgaatcagcgtaaatcccacactgcagggaagacctcgcacgtaactcacgttgtgcattgtcaaagtgttacattcgggcagcagcggatgatcctccagtatggtagcgcgggtttctgtctcaaaaggaggtagacgatccctactgtacggagtgcgccgagacaaccgagatcgtgttggtcgtagtgtcatgccaaatggaacgccggacgtagtcatatttcctgaagcaaaaccaggtgcgggcgtgacaaacagatctgcgtctccggtctcgccgcttagatcgctctgtgtagtagttgtagtatatccactctctcaaagcatccaggcgccccctggcttcgggttctatgtaaactccttcatgcgccgctgccctgataacatccaccaccgcagaataagccacacccagccaacctacacattcgttctgcgagtcacacacgggaggagcgggaagagctggaagaaccatgtttttttttttattccaaaagattatccaaaacctcaaaatgaagatctattaagtgaacgcgctcccctccggtggcgtggtcaaactctacagccaaagaacagataatggcatttgtaagatgttgcacaatggcttccaaaaggcaaacggccctcacgtccaagtggacgtaaaggctaaacccttcagggtgaatctcctctataaacattccagcaccttcaaccatgcccaaataattctcatctcgccaccttctcaatatatctctaagcaaatcccgaatattaagtccggccattgtaaaaatctgctccagagcgccctccaccttcagcctcaagcagcgaatcatgattgcaaaaattcaggttcctcacagacctgtataagattcaaaagcggaacattaacaaaaataccgcgatcccgtaggtcccttcgcagggccagctgaacataatcgtgcaggtctgcacggaccagcgcggccacttccccgccaggaaccatgacaaaagaacccacactgattatgacacgcatactcggagctatgctaaccagcgtagccccgatgtaagcttgttgcatgggcggcgatataaaatgcaaggtgctgctcaaaaaatcaggcaaagcctcgcgcaaaaaagaaagcacatcgtagtcatgctcatgcagataaaggcaggtaagctccggaaccaccacagaaaaagacaccatttttctctcaaacatgtctgcgggtttctgcataaacacaaaataaaataacaaaaaaacatttaaacattagaagcctgtcttacaacaggaaaaacaacccttataagcataagacggactacggccatgccggcgtgaccgtaaaaaaactggtcaccgtgattaaaaagcaccaccgacagctcctcggtcatgtccggagtcataatgtaagactcggtaaacacatcaggttgattcacatcggtcagtgctaaaaagcgaccgaaatagcccgggggaatacatacccgcaggcgtagagacaacattacagcccccataggaggtataacaaaattaataggagagaaaaacacataaacacctgaaaaaccctcctgcctaggcaaaatagcaccctcccgctccagaacaacatacagcgcttccacagcggcagccataacagtcagccttaccagtaaaaaagaaaacctattaaaaaaacaccactcgacacggcaccagctcaatcagtcacagtgtaaaaaagggccaagtgcagagcgagtatatataggactaaaaaatgacgtaacggttaaagtccacaaaaaacacccagaaaaccgcacgcgaacctacgcccagaaacgaaagccaaaaaacccacaacttcctcaaatcgtcacttccgttttcccacgttacgtcacttcccattttaagaaaactacaattcccaacacatacaagttactccgcccttaattaaatcggatccgatatctagatgtattcgcgaggtaccgagctcgaattctctggccgtcgttttacaacgtcgtgactgggaaaaccctggcgttacccaacttaatcgccttgcagcacatccccctttcgccagctggcgtaatagcgaagaggcccgcaccgatcgcccttcccaacagttgcgcagcctgaatggcgaatggcgcctgatgcggtattttctccttacgcatctgtgcggtatttcacaccgcatatggtgcactctcagtacaatctgctctgatgccgcatagttaagccagccccgacacccgccaacacccgctgacgcgccctgacgggcttgtctgctcccggcatccgcttacagacaagctgtgaccgtctccgggagctgcatgtgtcagaggttttcaccgtcatcaccgaaacgcgcga

SEQ ID NO: 61 - DNA, 15031 bp, Artificial Sequence
  Description of Artificial Sequence: Synthetic polynucleotide
tgcagctctggcccgtgtctcaaaatctctgatgttacattgcacaagataaaaatatatcatcatgaacaataaaactgtctgcttacataaacagtaatacaaggggtgttatgagccatattcaacgggaaacgtcgaggccgcgattaaattccaacatggatgctgatttatatgggtataaatgggctcgcgataatgtcgggcaatcaggtgcgacaatctatcgcttgtatgggaagcccgatgcgccagagttgtttctgaaacatggcaaaggtagcgttgccaatgatgttacagatgagatggtcagactaaactggctgacggaatttatgcctcttccgaccatcaagcattttatccgtactcctgatgatgcatggttactcaccactgcgatccccggaaaaacagcattccaggtattagaagaatatcctgattcaggtgaaaatattgttgatgcgctggcagtgttcctgcgccggttgcattcgattcctgtttgtaattgtccttttaacagcgatcgcgtatttcgtctcgctcaggcgcaatcacgaatgaataacggtttggttgatgcgagtgattttgatgacgagcgtaatggctggcctgttgaacaagtctggaaagaaatgcataaacttttgccattctcaccggattcagtcgtcactcatggtgatttctcacttgataaccttatttttgacgaggggaaattaataggttgtattgatgttggacgagtcggaatcgcagaccgataccaggatcttgccatcctatggaactgcctcggtgagttttctccttcattacagaaacggctttttcaaaaatatggtattgataatcctgatatgaataaattgcagtttcatttgatgctcgatgagtttttctaatcagaattggttaattggttgtaacattattcagattgggcttgatttaaaacttcatttttaatttaaaaggatctaggtgaagatcctttttgataatctcatgaccaaaatcccttaacgtgagttttcgttccactgagcgtcagaccccgtagaaaagatcaaaggatcttcttgagatcctttttttctgcgcgtaatctgctgcttgcaaacaaaaaaaccaccgctaccagcggtggtttgtttgccggatcaagagctaccaactctttttccgaaggtaactggcttcagcagagcgcagataccaaatactgttcttctagtgtagccgtagttaggccaccacttcaagaactctgtagcaccgcctacatacctcgctctgctaatcctgttaccagtggctgctgccagtggcgataagtcgtgtcttaccgggttggactcaagacgatagttaccggataaggcgcagcggtcgggctgaacggggggttcgtgcacacagcccagcttggagcgaacgacctacaccgaactgagatacctacagcgtgagctatgagaaagcgccacgcttcccgaagggagaaaggcggacaggtatccggtaagcggcagggtcggaacaggagagcgcacgagggagcttccagggggaaacgcctggtatctttatagtcctgtcgggtttcgccacctctgacttgagcgtcgatttttgtgatgctcgtcaggggggcggagcctatggaaaaacgccagcaacgcggcctttttacggttcctggccttttgctggccttttgctcacatgttctttcctgcgttatcccctgattctgtggataaccgtattaccgcctttgagtgagctgataccgctcgccgcagccgaacgaccgagcgcagcgagtcagtgagcgaggaagcggaagagcgcccaatacgcaaaccgcctctccccgcgcgttggccgattcattaatgcagctggcacgacaggtttcccgactggaaagcgggcagtgagcgcaacgcaattaatgtgagttagctcactcattaggcaccccaggctttacactttatgcttccggctcgtatgttgtgtggaattgtgagcggataacaatttcacacaggaaacagctatgaccatgattacaccaagcttgcatgcaggcctctgcagtcgaccagaagcaccatgtccttgggtccggcctgctgaatgcgcaggcggtcggccatgccccaggcttcgttttgacatcggcgcaggtctttgtagtagtcttgcatgagcctttctaccggcacttcttcttctccttcctcttgtcctgcatctcttgcatctatcgctgcggcggcggcggagtttggccgtaggtggcgccctcttcctcccatgcgtgtgaccccgaagcccctcatcggctgaagcagggctaggtcggcgacaacgcgctcggctaatatggcctgctgcacctgcgtgagggtagactggaagtcatccatgtccacaaagcggtggtatgcgcccgtgttgatggtgtaagtgcagttggccataacggaccagttaacggtctggtgacccggctgcgagagctcggtgtacctgagacgcgagtaagccctcgagtcaaatacgtagtcgttgcaagtccgcaccaggtactggtatcccaccaaaaagtgcggcggcggctggcggtagaggggccagcgtagggtggccggggctccgggggcgagatcttccaacataaggcgatgatatccgtagatgtacctggacatccaggtgatgccggcggcggtggtggaggcgcgcggaaagtcgcggacgcggttccagatgttgcgcagcggcaaaaagtgctccatggtcgggacgctctggccggtcaggcgcgcgcaatcgttgacgctctagcgtgcaaaaggagagcctgtaagcgggcactcttccgtggtctggtggataaattcgcaagggtatcatggcggacgaccggggttcgagccccgtatccggccgtccgccgtgatccatgcggttaccgcccgcgtgtcgaacccaggtgtgcgacgtcagacaacgggggagtgctccttttggcttccttccaggcgcggcggctgctgcgctagcttttttggccactggccgcgcgcagcgtaagcggttaggctggaaagcgaaagcattaagtggctcgctccctgtagccggagggttattttccaagggttgagtcgcgggacccccggttcgagtctcggaccgagactgggggcgtacactggatggcctttgcctggaacccgcactcaaaaacatgctacctctttgagccctttggcttttctgaccagcgactcaagcaggtttaccagtttgagtacgagtcactcctgcgccgtagcgccattgcttcttcccccgaccgctgtataacgctggaaaagtccacccaaagcgtacaggggcccaactcggccgcctgtggactattctgctgcatgtttctccacgcctttgccaactggccccaaactcccatggatcacaaccccaccatgaaccttattaccggggtacccaactccatgctcaacagtccccaggtacagcccaccctgcgtcgcaaccaggaacagctctacagcttcctggagcgccactcgccctacttccgcagccacagtgcgcagattaggagcgccacttctttttgtcacttgaaaaacatgtaaaaataatgtactagagacactttcaataaaggcaaatgcttttatttgtacactctcgggtgattatttacccccacccttgccgtctgcgccgtttaaaaatcaaaggggttctgccgcgcatcgctatgcgccactggcagggacacgttgcgatactggtgtttagtgctccacttaaactcaggcacaaccatccgcggcagctcggtgaagttttcactccacaggctgcgcaccatcaccaacgcgtttagcaggtcgggcgccgatatcttgaagtcgcagttggggcctccgccctgcgcgcgcgagttgcgatacacagggttgcagcactggaacactatcagcgccgggtggtgcacgctggccagcacgctcttgtcggagatcagatccgcgtccaggtcctccgcgttgctcagggcgaacggagtcaactttggtagctgccttcccaaaaagggcgcgtgcccaggctttgagttgcactcgcaccgtagtggcatcaaaaggtgaccgtgcccggtctgggcgttaggatacagcgcctgcataaaagccttgatctgcttaaaagccacctgagcctttgcgccttcagagaagaacatgccgcaagacttgccggaaaactgattggccggacaggccgcgtcgtgcacgcagcaccttgcgtcggtgttggagatctgcaccacatttcggccccaccggttcttcacgatcttggccttgctagactgctccttcagcgcgcgctgcccgttttcgctcgtcacatccatttcaatcacgtgctccttatttatcataatgcttccgtgtagacacttaagctcgccttcgatctcagcgcagcggtgcagccacaacgcgcagcccgtgggctcgtgatgcttgtaggtcacctctgcaaacgactgcaggtacgcctgcaggaatcgccccatcatcgtcacaaaggtcttgttgctggtgaaggtcagctgcaacccgcggtgctcctcgttcagccaggtcttgcatacggccgccagagcttccacttggtcaggcagtagtttgaagttcgcctttagatcgttatccacgtggtacttgtccatcagcgcgcgcgcagcctccatgcccttctcccacgcagacacgatcggcacactcagcgggttcatcaccgtaatttcactttccgcttcgctgggctcttcctcttcctcttgcgtccgcataccacgcgccactgggtcgtcttcattcagccgccgcactgtgcgcttacctcctttgccatgcttgattagcaccggtgggttgctgaaacccaccatttgtagcgccacatcttctctttcttcctcgctgtccacgattacctctggtgatggcgggcgctcgggcttgggagaagggcgcttctttttcttcttgggcgcaatggccaaatccgccgccgaggtcgatggccgcgggctgggtgtgcgcggcaccagcgcgtcttgtgatgagtcttcctcgtcctcggactcgatacgccgcctcatccgcttttttgggggcgcccggggaggcggcggcgacggggacggggacgacacgtcctccatggttgggggacgtcgcgccgcaccgcgtccgcgctcgggggtggtttcgcgctgctcctcttcccgactggccatttccttctcctataggcagaaaaagatccacaaaagcgaagatcagcttcggcgcacgctggaagacgcggaggctctcttcagtaaatactgcgcgctgactcttaaggactagtttcgcgccctttctcaaatttaagcgcgaaaactacgtcatctccagcggccacacccggcgccagcacctgttgtcagcgccattggcgcgcccgcccgccgcgcgcttcgctttttatagggccgccgccgccgccgcctcgccataaaaggaaactttcggagcgcgccgctctgattggctgccgccgcacctctccgcctcgccccgccccgcccctcgccccgccccgccccgcctggcgcgcgccccccccccccccccgcccccatcgctgcacaaaataattaaaaaataaataaatacaaaattgggggtggggaggggggggagatggggagagtgaagcagaacgtggggctcacctcgaggccggccgaatatcttcatttaaatgtgtgtcagttagggtgtggaaagtccccaggctccccagcaggcagaagtatgcaaagcatgcatctcaattagtcagcaaccaggtgtggaaagtccccaggctccccagcaggcagaagtatgcaaagcatgcatctcaattagtcagcaaccatagtcccgcccctaactccgcccatcccgcccctaactccgcccagttccgcccattctccgccccatggctgactaattttttttatttatgcagaggccgaggccgcctcggcctctgagctattccagaagtagtgaggaggcttttttggaggcctaggcttttgcaaacgccggcgcaccgcgggcccgatccaccggtactgttggtaaagccaccatgttttccggtggcggcggcccgctgtcccccggaggaaagtcggcggccagggcggcgtccgggttttttgcgcccgccggccctcgcggagccagccggggacccccgccttgtttgaggcaaaacttttacaacccctacctcgccccagtcgggacgcaacagaagccgaccgggccaacccagcgccatacgtactatagcgaatgcgatgaatttcgattcatcgccccgcgggtgctggacgaggatgcccccccggagaagcgcgccggggtgcacgacggtcacctcaagcgcgcccccaaggtgtactgcgggggggacgagcgcgacgtcctccgcgtcgggtcgggcggcttctggccgcggcgctcgcgcctgtggggcggcgtggaccacgccccggcggggttcaaccccaccgtcaccgtctttcacgtgtacgacatcctggagaacgtggagcacgcgtacggcatgcgcgcggcccagttccacgcgcggtttatggacgccatcacaccgacggggaccgtcatcacgctcctgggcctgactccggaaggccaccgggtggccgttcacgtttacggcacgcggcagtacttttacatgaacaaggaggaggtcgacaggcacctacaatgccgcgccccacgagatctctgcgagcgcatggccgcggccctgcgcgagtccccgggcgcgtcgttccgcggcatctccgcggaccacttcgaggcggaggtggtggagcgcaccgacgtgtactactacgagacgcgccccgctctgttttaccgcgtctacgtccgaagcgggcgcgtgctgtcgtacctgtgcgacaacttctgcccggccatcaagaagtacgagggtggggtcgacgccaccacccggttcatcctggacaaccccgggttcgtcaccttcggctggtaccgtctcaaaccgggccggaacaacacgctagcccagccgcgggccccgatggccttcgggacatccagcgacgtcgagtttaactgtacggcggacaacctggccatcgaggggggcatgagcgacctaccggcatacaagctcatgtgcttcgatatcgaatgcaaggcggggggggaggacgagctggcctttccggtggccgggcacccggaggacctggtcatccagatatcctgtctgctctacgacctgtccaccaccgccctggagcacgtcctcctgttttcgctcggttcctgcgacctccccgaatcccacctgaacgagctggcggccaggggcctgcccacgcccgtggttctggaattcgacagcgaattcgagatgctgttggccttcatgacccttgtgaaacagtacggccccgagttcgtgaccgggtacaacatcatcaacttcgactggcccttcttgctggccaagctgacggacatttacaaggtccccctggacgggtacggccgcatgaacggccggggcgtgtttcgcgtgtgggacataggccagagccacttccagaagcgcagcaagataaaggtgaacggcatggtgaacatcgacatgtacgggattataaccgacaagatcaagctctcgagctacaagctcaacgccgtggccgaagccgtcctgaaggacaagaagaaggacctgagctatcgcgacatccccgcctactacgccgccgggcccgcgcaacgcggggtgatcggcgagtactgcatacaggattccctgctggtgggccagctgttttttaagtttttgccccatctggagctctcggccgtcgcgcgcttggcgggtattaacatcacccgcaccatctacgacggccagcagatccgcgtctttacgtgcctgctgcgcctggccgaccagaagggctttattctgccggacacccaggggcgatttaggggcgccgggggggaggcgcccaagcgtccggccgcagcccgggaggacgaggagcggccagaggaggagggggaggacgaggacgaacgcgaggagggcgggggcgagcgggagccggagggcgcgcgggagaccgccggcaggcacgtggggtaccagggggccagggtccttgaccccacttccgggtttcacgtgaaccccgtggtggtgttcgactttgccagcctgtaccccagcatcatccaggcccacaacctgtgcttcagcacgctctccctgagggccgacgcagtggcgcacctggaggcgggcaaggactacctggagatcgaggtgggggggcgacggctgttcttcgtcaaggctcacgtgcgagagagcctcctcagcatcctcctgcgggactggctcgccatgcgaaagcagatccgctcgcggattccccagagcagccccgaggaggccgtgctcctggacaagcagcaggccgccatcaaggtcgtgtgtaactcggtgtacgggttcacgggagtgcagcacggactcctgccgtgcctgcacgttgccgcgacggtgacgaccatcggccgcgagatgctgctcgcgacccgcgagtacgtccacgcgcgctgggcggccttcgaacagctcctggccgatttcccggaggcggccgacatgcgcgcccccgggccctattccatgcgcatcatctacggggacacggactccatctttgtgctgtgccgcggcctcacggccgccgggctgacggccgtgggcgacaagatggcgagccacatctcgcgcgcgctgtttctgccccccatcaaactcgagtgcgaaaagacgttcaccaagctgctgctgatcgccaagaaaaagtacatcggcgtcatctacgggggtaagatgctcatcaagggcgtggatctggtgcgcaaaaacaactgcgcgtttatcaaccgcacctccagggccctggtcgacctgctgttttacgacgataccgtctccggagccgccgcggcgttagccgagcgccccgcggaggagtggctggcgcgacccctgcccgagggactgcaggcgttcggggccgtcctcgtagacgcccatcggcgcatcaccgacccggagagggacatccaggactttgtcctcaccgccgaactgagcagacacccgcgcgcgtacaccaacaagcgcctggcccacctgacggtgtattacaagctcatggcccgccgcgcgcaggtcccgtccatcaaggaccggatcccgtacgtgatcgtggcccagacccgcgaggtagaggagacggtcgcgcggctggccgccctccgcgagctagacgccgccgccccaggggacgagcccgccccccccgcggccctgccctccccggccaagcgcccccgggagacgccgtcgcctgccgaccccccgggaggcgcgtccaagccccgcaagctgctggtgtccgagctggccgaggatcccgcatacgccattgcccacggcgtcgccctgaacacggactattacttctcccacctgttgggggcggcgtgcgtgacattcaaggccctgtttgggaataacgccaagatcaccgagagtctgttaaaaaggtttattcccgaagtgtggcaccccccggacgacgtggccgcgcggctccggaccgcagggttcggggcggtgggtgccggcgctacggcggaggaaactcgtcgaatgttgcatagagcctttgatactctagcagaattcggcagtggagcaacaaacttctctctgctgaaacaagccggagatgtcgaagagaatcctggaccgacggattcccctggcggtgtggcccccgcctcccccgtggaggacgcgtcggacgcgtccctcgggcagccggaggagggggcgccctgccaggtggtcctgcagggcgccgaacttaatggaatcctacaggcgtttgccccgctgcgcacgagccttctggactcgcttctggttatgggcgaccggggcatccttatccataacacgatctttggggagcaggtgttcctgcccctggaacactcgcaattcagtcggtatcgctggcgcggacccacggcggcgttcctgtctctcgtggaccagaagcgctccctcctgagcgtgtttcgcgccaaccagtacccggacctacgtcgggtggagttggcgatcacgggccaggccccgtttcgcacgctggttcagcgcatatggacgacgacgtccgacggcgaggccgttgagctagccagcgagacgctgatgaagcgcgaactgacgagctttgtggtgctggttccccagggaacccccgacgttcagttgcgcctgacgaggccgcagctcaccaaggtccttaacgcgaccggggccgatagtgccacgcccaccacgttcgagctcggggttaacggcaaattttccgtgttcaccacgagtacctgcgtcacctttgctgcccgcgaggagggcgtgtcgtccagcaccagcacccaggtccagatcctgtccaacgcgctcaccaaggcgggccaggccgccgcgaacgccaagacggtgtacggggaaaatacccatcgcaccttctctgtggtcgtcgacgattgcagcatgcgggcggtgctccggcgactgcaggtcggcgggggcaccctcaagttcttcctcacgacccccgtccccagtctgtgcgtcaccgccaccggtcccaacgcggtatcggcggtatttctcctgaaaccccagaagatttgcctggactggctgggtcatagccaggggtctccttcagccgggagctcggcctcccgggcctctgggagcgagccaacagacagccaggactccgcgtcggacgcggtcagccacggcgatccggaagacctcgatggcgctgcccgggcgggagaggcgggggccttgcatgcctgtccgatgccgtcgtcgaccacgcgggtcactcccacgaccaagcgggggcgctcggggggcgaggatgcgcgcgcggacacggccctaaagaaacctaagacggggtcgcccaccgcacccccgcccgcagatccagtccccctggacacggaggacgactccgatgcggcggacgggacggcggcccgtcccgccgctccagacgcccggagcggaagccgttacgcgtgttactttcgcgacctcccgaccggagaagcaagccccggcgccttctccgccttccgggggggcccccaaaccccgtatggttttggattcccctgataggatccgactgcaggtagctgtgccttctagttgccagccatctgttgtttgcccctcccccgtgccttccttgaccctggaaggtgccactcccactgtcctttcctaataaaatgaggaaattgcatcgcattgtctgagtaggtgtcattctattctggggggtggggtggggcaggacagcaagggggaggattgggaagacaatagcaggcatgctggggatgcggtgggctctatgggtttaaacatcgatgcggccgcaacttgtttattgcagcttataatggttacaaataaagcaatagcatcacaaatttcacaaataaagcatttttttcactgcattctagttgtggtttgtccaaactcatcaatgtatcttagcttaacgggcggcgaaggagaagtccacgcctacatgggggtagagtcataatcgtgcatcaggatagggcggtggtgctgcagcagcgcgcgaataaactgctgccgccgccgctccgtcctgcaggaatacaacatggcagtggtctcctcagcgatgattcgcaccgcccgcagcataaggcgccttgtcctccgggcacagcagcgcaccctgatctcacttaaatcagcacagtaactgcagcacagcaccacaatattgttcaaaatcccacagtgcaaggcgctgtatccaaagctcatggcggggaccacagaacccacgtggccatcataccacaagcgcaggtagattaagtggcgacccctcataaacacgctggacataaacattacctcttttggcatgttgtaattcaccacctcccggtaccatataaacctctgattaaacatggcgccatccaccaccatcctaaaccagctggccaaaacctgcccgccggctatacactgcagggaaccgggactggaacaatgacagtggagagcccaggactcgtaaccatggatcatcatgctcgtcatgatatcaatgttggcacaacacaggcacacgtgcatacacttcctcaggattacaagctcctcccgcgttagaaccatatcccagggaacaacccattcctgaatcagcgtaaatcccacactgcagggaagacctcgcacgtaactcacgttgtgcattgtcaaagtgttacattcgggcagcagcggatgatcctccagtatggtagcgcgggtttctgtctcaaaaggaggtagacgatccctactgtacggagtgcgccgagacaaccgagatcgtgttggtcgtagtgtcatgccaaatggaacgccggacgtagtcatatttcctgaagcaaaaccaggtgcgggcgtgacaaacagatctgcgtctccggtctcgccgcttagatcgctctgtgtagtagttgtagtatatccactctctcaaagcatccaggcgccccctggcttcgggttctatgtaaactccttcatgcgccgctgccctgataacatccaccaccgcagaataagccacacccagccaacctacacattcgttctgcgagtcacacacgggaggagcgggaagagctggaagaaccatgtttttttttttattccaaaagattatccaaaacctcaaaatgaagatctattaagtgaacgcgctcccctccggtggcgtggtcaaactctacagccaaagaacagataatggcatttgtaagatgttgcacaatggcttccaaaaggcaaacggccctcacgtccaagtggacgtaaaggctaaacccttcagggtgaatctcctctataaacattccagcaccttcaaccatgcccaaataattctcatctcgccaccttctcaatatatctctaagcaaatcccgaatattaagtccggccattgtaaaaatctgctccagagcgccctccaccttcagcctcaagcagcgaatcatgattgcaaaaattcaggttcctcacagacctgtataagattcaaaagcggaacattaacaaaaataccgcgatcccgtaggtcccttcgcagggccagctgaacataatcgtgcaggtctgcacggaccagcgcggccacttccccgccaggaaccatgacaaaagaacccacactgattatgacacgcatactcggagctatgctaaccagcgtagccccgatgtaagcttgttgcatgggcggcgatataaaatgcaaggtgctgctcaaaaaatcaggcaaagcctcgcgcaaaaaagaaagcacatcgtagtcatgctcatgcagataaaggcaggtaagctccggaaccaccacagaaaaagacaccatttttctctcaaacatgtctgcgggtttctgcataaacacaaaataaaataacaaaaaaacatttaaacattagaagcctgtcttacaacaggaaaaacaacccttataagcataagacggactacggccatgccggcgtgaccgtaaaaaaactggtcaccgtgattaaaaagcaccaccgacagctcctcggtcatgtccggagtcataatgtaagactcggtaaacacatcaggttgattcacatcggtcagtgctaaaaagcgaccgaaatagcccgggggaatacatacccgcaggcgtagagacaacattacagcccccataggaggtataacaaaattaataggagagaaaaacacataaacacctgaaaaaccctcctgcctaggcaaaatagcaccctcccgctccagaacaacatacagcgcttccacagcggcagccataacagtcagccttaccagtaaaaaagaaaacctattaaaaaaacaccactcgacacggcaccagctcaatcagtcacagtgtaaaaaagggccaagtgcagagcgagtatatataggactaaaaaatgacgtaacggttaaagtccacaaaaaacacccagaaaaccgcacgcgaacctacgcccagaaacgaaagccaaaaaacccacaacttcctcaaatcgtcacttccgttttcccacgttacgtcacttcccattttaagaaaactacaattcccaacacatacaagttactccgcccttaattaaatcggatccgatatctagatgtattcgcgaggtaccgagctcgaattctctggccgtcgttttacaacgtcgtgactgggaaaaccctggcgttacccaacttaatcgccttgcagcacatccccctttcgccagctggcgtaatagcgaagaggcccgcaccgatcgcccttcccaacagttgcgcagcctgaatggcgaatggcgcctgatgcggtattttctccttacgcatctgtgcggtatttcacaccgcatatggtgcactctcagtacaatctgctctgatgccgcatagttaagccagccccgacacccgccaacacccgctgacgcgccctgacgggcttgtctgctcccggcatccgcttacagacaagctgtgaccgtctccgggagctgcatgtgtcagaggttttcaccgtcatcaccgaaacgcgcga

SEQ ID NO: 62 - DNA, 14267 bp, Artificial Sequence
  Description of Artificial Sequence: Synthetic polynucleotide
tgcagctctggcccgtgtctcaaaatctctgatgttacattgcacaagataaaaatatatcatcatgaacaataaaactgtctgcttacataaacagtaatacaaggggtgttatgagccatattcaacgggaaacgtcgaggccgcgattaaattccaacatggatgctgatttatatgggtataaatgggctcgcgataatgtcgggcaatcaggtgcgacaatctatcgcttgtatgggaagcccgatgcgccagagttgtttctgaaacatggcaaaggtagcgttgccaatgatgttacagatgagatggtcagactaaactggctgacggaatttatgcctcttccgaccatcaagcattttatccgtactcctgatgatgcatggttactcaccactgcgatccccggaaaaacagcattccaggtattagaagaatatcctgattcaggtgaaaatattgttgatgcgctggcagtgttcctgcgccggttgcattcgattcctgtttgtaattgtccttttaacagcgatcgcgtatttcgtctcgctcaggcgcaatcacgaatgaataacggtttggttgatgcgagtgattttgatgacgagcgtaatggctggcctgttgaacaagtctggaaagaaatgcataaacttttgccattctcaccggattcagtcgtcactcatggtgatttctcacttgataaccttatttttgacgaggggaaattaataggttgtattgatgttggacgagtcggaatcgcagaccgataccaggatcttgccatcctatggaactgcctcggtgagttttctccttcattacagaaacggctttttcaaaaatatggtattgataatcctgatatgaataaattgcagtttcatttgatgctcgatgagtttttctaatcagaattggttaattggttgtaacattattcagattgggcttgatttaaaacttcatttttaatttaaaaggatctaggtgaagatcctttttgataatctcatgaccaaaatcccttaacgtgagttttcgttccactgagcgtcagaccccgtagaaaagatcaaaggatcttcttgagatcctttttttctgcgcgtaatctgctgcttgcaaacaaaaaaaccaccgctaccagcggtggtttgtttgccggatcaagagctaccaactctttttccgaaggtaactggcttcagcagagcgcagataccaaatactgttcttctagtgtagccgtagttaggccaccacttcaagaactctgtagcaccgcctacatacctcgctctgctaatcctgttaccagtggctgctgccagtggcgataagtcgtgtcttaccgggttggactcaagacgatagttaccggataaggcgcagcggtcgggctgaacggggggttcgtgcacacagcccagcttggagcgaacgacctacaccgaactgagatacctacagcgtgagctatgagaaagcgccacgcttcccgaagggagaaaggcggacaggtatccggtaagcggcagggtcggaacaggagagcgcacgagggagcttccagggggaaacgcctggtatctttatagtcctgtcgggtttcgccacctctgacttgagcgtcgatttttgtgatgctcgtcaggggggcggagcctatggaaaaacgccagcaacgcggcctttttacggttcctggccttttgctggccttttgctcacatgttctttcctgcgttatcccctgattctgtggataaccgtattaccgcctttgagtgagctgataccgctcgccgcagccgaacgaccgagcgcagcgagtcagtgagcgaggaagcggaagagcgcccaatacgcaaaccgcctctccccgcgcgttggccgattcattaatgcagctggcacgacaggtttcccgactggaaagcgggcagtgagcgcaacgcaattaatgtgagttagctcactcattaggcaccccaggctttacactttatgcttccggctcgtatgttgtgtggaattgtgagcggataacaatttcacacaggaaacagctatgaccatgattacaccaagcttgcatgcaggcctatccgtagatgtacctggacatccaggtgatgccggcggcggtggtggaggcgcgcggaaagtcgcggacgcggttccagatgttgcgcagcggcaaaaagtgctccatggtcgggacgctctggccggtgaggcgtgcgcagtcgttgacgctctagaccgtgcaaaaggagagcctgtaagcgggcactcttccgtggtctggtggataaattcgcaagggtatcatggcggacgaccggggttcgaaccccggatccggccgtccgccgtgatccatgcggttaccgcccgcgtgtcgaacccaggtgtgcgacgtcagacaacgggggagcgctccttttggcttccttccaggcgcggcggctgctgcgctagcttttttggccactggccgcgcgcggcgtaagcggttaggctggaaagcgaaagcattaagtggctcgctccctgtagccggagggttattttccaagggttgagtcgcaggacccccggttcgagtctcgggccggccggactgcggcgaacgggggtttgcctccccgtcatgcaagaccccgcttgcaaattcctccggaaacagggacgagccccttttttgcttttcccagatgcatccggtgctgcggcagatgcgcccccctcctcagcagcggcaagagcaagagcagcggcagacatgcagggcaccctccccttctcctaccgcgtcaggaggggcaacatcgatccagacatgataagatacattgatgagtttggacaaaccacaactagaatgcagtgaaaaaaatgctttatttgtgaaatttgtgatgctattgctttatttgtaaccattataagctgcaataaacaagtttgtacactctcgggtgattatttacccccacccttgccgtctgcgccgtttaaaaatcaaaggggttctgccgcgcatcgctatgcgccactggcagggacacgttgcgatactggtgtttagtgctccacttaaactcaggcacaaccatccgcggcagctcggtgaagttttcactccacaggctgcgcaccatcaccaacgcgtttagcaggtcgggcgccgatatcttgaagtcgcagttggggcctccgccctgcgcgcgcgagttgcgatacacagggttgcagcactggaacactatcagcgccgggtggtgcacgctggccagcacgctcttgtcggagatcagatccgcgtccaggtcctccgcgttgctcagggcgaacggagtcaactttggtagctgccttcccaaaaagggcgcgtgcccaggctttgagttgcactcgcaccgtagtggcatcaaaaggtgaccgtgcccggtctgggcgttaggatacagcgcctgcataaaagccttgatctgcttaaaagccacctgagcctttgcgccttcagagaagaacatgccgcaagacttgccggaaaactgattggccggacaggccgcgtcgtgcacgcagcaccttgcgtcggtgttggagatctgcaccacatttcggccccaccggttcttcacgatcttggccttgctagactgctccttcagcgcgcgctgcccgttttcgctcgtcacatccatttcaatcacgtgctccttatttatcataatgcttccgtgtagacacttaagctcgccttcgatctcagcgcagcggtgcagccacaacgcgcagcccgtgggctcgtgatgcttgtaggtcacctctgcaaacgactgcaggtacgcctgcaggaatcgccccatcatcgtcacaaaggtcttgttgctggtgaaggtcagctgcaacccgcggtgctcctcgttcagccaggtcttgcatacggccgccagagcttccacttggtcaggcagtagtttgaagttcgcctttagatcgttatccacgtggtacttgtccatcagcgcgcgcgcagcctccatgcccttctcccacgcagacacgatcggcacactcagcgggttcatcaccgtaatttcactttccgcttcgctgggctcttcctcttcctcttgcgtccgcataccacgcgccactgggtcgtcttcattcagccgccgcactgtgcgcttacctcctttgccatgcttgattagcaccggtgggttgctgaaacccaccatttgtagcgccacatcttctctttcttcctcgctgtccacgattacctctggtgatggcgggcgctcgggcttgggagaagggcgcttctttttcttcttgggcgcaatggccaaatccgccgccgaggtcgatggccgcgggctgggtgtgcgcggcaccagcgcgtcttgtgatgagtcttcctcgtcctcggactcgatacgccgcctcatccgcttttttgggggcgcccggggaggcggcggcgacggggacggggacgacacgtcctccatggttgggggacgtcgcgccgcaccgcgtccgcgctcgggggtggtttcgcgctgctcctcttcccgactggccatttccttctcctataggcagaaaaagatccacaaaagcgaagatcagcttcggcgcacgctggaagacgcggaggctctcttcagtaaatactgcgcgctgactcttaaggactagtttcgcgccctttctcaaatttaagcgcgaaaactacgtcatctccagcggccacacccggcgccagcacctgttgtcagcgccattggcgcgcccgcccgccgcgcgcttcgctttttatagggccgccgccgccgccgcctcgccataaaaggaaactttcggagcgcgccgctctgattggctgccgccgcacctctccgcctcgccccgccccgcccctcgccccgccccgccccgcctggcgcgcgccccccccccccccccgcccccatcgctgcacaaaataattaaaaaataaataaatacaaaattgggggtggggaggggggggagatggggagagtgaagcagaacgtggggctcacctcgaggccggccgaatatcttcatttaaatgtgtgtcagttagggtgtggaaagtccccaggctccccagcaggcagaagtatgcaaagcatgcatctcaattagtcagcaaccaggtgtggaaagtccccaggctccccagcaggcagaagtatgcaaagcatgcatctcaattagtcagcaaccatagtcccgcccctaactccgcccatcccgcccctaactccgcccagttccgcccattctccgccccatggctgactaattttttttatttatgcagaggccgaggccgcctcggcctctgagctattccagaagtagtgaggaggcttttttggaggcctaggcttttgcaaacgccggcgcaccgcgggcccgatccaccggtactgttggtaaagccaccatgttttccggtggcggcggcccgctgtcccccggaggaaagtcggcggccagggcggcgtccgggttttttgcgcccgccggccctcgcggagccagccggggacccccgccttgtttgaggcaaaacttttacaacccctacctcgccccagtcgggacgcaacagaagccgaccgggccaacccagcgccatacgtactatagcgaatgcgatgaatttcgattcatcgccccgcgggtgctggacgaggatgcccccccggagaagcgcgccggggtgcacgacggtcacctcaagcgcgcccccaaggtgtactgcgggggggacgagcgcgacgtcctccgcgtcgggtcgggcggcttctggccgcggcgctcgcgcctgtggggcggcgtggaccacgccccggcggggttcaaccccaccgtcaccgtctttcacgtgtacgacatcctggagaacgtggagcacgcgtacggcatgcgcgcggcccagttccacgcgcggtttatggacgccatcacaccgacggggaccgtcatcacgctcctgggcctgactccggaaggccaccgggtggccgttcacgtttacggcacgcggcagtacttttacatgaacaaggaggaggtcgacaggcacctacaatgccgcgccccacgagatctctgcgagcgcatggccgcggccctgcgcgagtccccgggcgcgtcgttccgcggcatctccgcggaccacttcgaggcggaggtggtggagcgcaccgacgtgtactactacgagacgcgccccgctctgttttaccgcgtctacgtccgaagcgggcgcgtgctgtcgtacctgtgcgacaacttctgcccggccatcaagaagtacgagggtggggtcgacgccaccacccggttcatcctggacaaccccgggttcgtcaccttcggctggtaccgtctcaaaccgggccggaacaacacgctagcccagccgcgggccccgatggccttcgggacatccagcgacgtcgagtttaactgtacggcggacaacctggccatcgaggggggcatgagcgacctaccggcatacaagctcatgtgcttcgatatcgaatgcaaggcggggggggaggacgagctggcctttccggtggccgggcacccggaggacctggtcatccagatatcctgtctgctctacgacctgtccaccaccgccctggagcacgtcctcctgttttcgctcggttcctgcgacctccccgaatcccacctgaacgagctggcggccaggggcctgcccacgcccgtggttctggaattcgacagcgaattcgagatgctgttggccttcatgacccttgtgaaacagtacggccccgagttcgtgaccgggtacaacatcatcaacttcgactggcccttcttgctggccaagctgacggacatttacaaggtccccctggacgggtacggccgcatgaacggccggggcgtgtttcgcgtgtgggacataggccagagccacttccagaagcgcagcaagataaaggtgaacggcatggtgaacatcgacatgtacgggattataaccgacaagatcaagctctcgagctacaagctcaacgccgtggccgaagccgtcctgaaggacaagaagaaggacctgagctatcgcgacatccccgcctactacgccgccgggcccgcgcaacgcggggtgatcggcgagtactgcatacaggattccctgctggtgggccagctgttttttaagtttttgccccatctggagctctcggccgtcgcgcgcttggcgggtattaacatcacccgcaccatctacgacggccagcagatccgcgtctttacgtgcctgctgcgcctggccgaccagaagggctttattctgccggacacccaggggcgatttaggggcgccgggggggaggcgcccaagcgtccggccgcagcccgggaggacgaggagcggccagaggaggagggggaggacgaggacgaacgcgaggagggcgggggcgagcgggagccggagggcgcgcgggagaccgccggcaggcacgtggggtaccagggggccagggtccttgaccccacttccgggtttcacgtgaaccccgtggtggtgttcgactttgccagcctgtaccccagcatcatccaggcccacaacctgtgcttcagcacgctctccctgagggccgacgcagtggcgcacctggaggcgggcaaggactacctggagatcgaggtgggggggcgacggctgttcttcgtcaaggctcacgtgcgagagagcctcctcagcatcctcctgcgggactggctcgccatgcgaaagcagatccgctcgcggattccccagagcagccccgaggaggccgtgctcctggacaagcagcaggccgccatcaaggtcgtgtgtaactcggtgtacgggttcacgggagtgcagcacggactcctgccgtgcctgcacgttgccgcgacggtgacgaccatcggccgcgagatgctgctcgcgacccgcgagtacgtccacgcgcgctgggcggccttcgaacagctcctggccgatttcccggaggcggccgacatgcgcgcccccgggccctattccatgcgcatcatctacggggacacggactccatctttgtgctgtgccgcggcctcacggccgccgggctgacggccgtgggcgacaagatggcgagccacatctcgcgcgcgctgtttctgccccccatcaaactcgagtgcgaaaagacgttcaccaagctgctgctgatcgccaagaaaaagtacatcggcgtcatctacgggggtaagatgctcatcaagggcgtggatctggtgcgcaaaaacaactgcgcgtttatcaaccgcacctccagggccctggtcgacctgctgttttacgacgataccgtctccggagccgccgcggcgttagccgagcgccccgcggaggagtggctggcgcgacccctgcccgagggactgcaggcgttcggggccgtcctcgtagacgcccatcggcgcatcaccgacccggagagggacatccaggactttgtcctcaccgccgaactgagcagacacccgcgcgcgtacaccaacaagcgcctggcccacctgacggtgtattacaagctcatggcccgccgcgcgcaggtcccgtccatcaaggaccggatcccgtacgtgatcgtggcccagacccgcgaggtagaggagacggtcgcgcggctggccgccctccgcgagctagacgccgccgccccaggggacgagcccgccccccccgcggccctgccctccccggccaagcgcccccgggagacgccgtcgcctgccgaccccccgggaggcgcgtccaagccccgcaagctgctggtgtccgagctggccgaggatcccgcatacgccattgcccacggcgtcgccctgaacacggactattacttctcccacctgttgggggcggcgtgcgtgacattcaaggccctgtttgggaataacgccaagatcaccgagagtctgttaaaaaggtttattcccgaagtgtggcaccccccggacgacgtggccgcgcggctccggaccgcagggttcggggcggtgggtgccggcgctacggcggaggaaactcgtcgaatgttgcatagagcctttgatactctagcagaattcggcagtggagcaacaaacttctctctgctgaaacaagccggagatgtcgaagagaatcctggaccgacggattcccctggcggtgtggcccccgcctcccccgtggaggacgcgtcggacgcgtccctcgggcagccggaggagggggcgccctgccaggtggtcctgcagggcgccgaacttaatggaatcctacaggcgtttgccccgctgcgcacgagccttctggactcgcttctggttatgggcgaccggggcatccttatccataacacgatctttggggagcaggtgttcctgcccctggaacactcgcaattcagtcggtatcgctggcgcggacccacggcggcgttcctgtctctcgtggaccagaagcgctccctcctgagcgtgtttcgcgccaaccagtacccggacctacgtcgggtggagttggcgatcacgggccaggccccgtttcgcacgctggttcagcgcatatggacgacgacgtccgacggcgaggccgttgagctagccagcgagacgctgatgaagcgcgaactgacgagctttgtggtgctggttccccagggaacccccgacgttcagttgcgcctgacgaggccgcagctcaccaaggtccttaacgcgaccggggccgatagtgccacgcccaccacgttcgagctcggggttaacggcaaattttccgtgttcaccacgagtacctgcgtcacctttgctgcccgcgaggagggcgtgtcgtccagcaccagcacccaggtccagatcctgtccaacgcgctcaccaaggcgggccaggccgccgcgaacgccaagacggtgtacggggaaaatacccatcgcaccttctctgtggtcgtcgacgattgcagcatgcgggcggtgctccggcgactgcaggtcggcgggggcaccctcaagttcttcctcacgacccccgtccccagtctgtgcgtcaccgccaccggtcccaacgcggtatcggcggtatttctcctgaaaccccagaagatttgcctggactggctgggtcatagccaggggtctccttcagccgggagctcggcctcccgggcctctgggagcgagccaacagacagccaggactccgcgtcggacgcggtcagccacggcgatccggaagacctcgatggcgctgcccgggcgggagaggcgggggccttgcatgcctgtccgatgccgtcgtcgaccacgcgggtcactcccacgaccaagcgggggcgctcggggggcgaggatgcgcgcgcggacacggccctaaagaaacctaagacggggtcgcccaccgcacccccgcccgcagatccagtccccctggacacggaggacgactccgatgcggcggacgggacggcggcccgtcccgccgctccagacgcccggagcggaagccgttacgcgtgttactttcgcgacctcccgaccggagaagcaagccccggcgccttctccgccttccgggggggcccccaaaccccgtatggttttggattcccctgataggatccgactgcaggtagctgtgccttctagttgccagccatctgttgtttgcccctcccccgtgccttccttgaccctggaaggtgccactcccactgtcctttcctaataaaatgaggaaattgcatcgcattgtctgagtaggtgtcattctattctggggggtggggtggggcaggacagcaagggggaggattgggaagacaatagcaggcatgctggggatgcggtgggctctatgggtttaaacatcgatgcggccgcaacttgtttattgcagcttataatggttacaaataaagcaatagcatcacaaatttcacaaataaagcatttttttcactgcattctagttgtggtttgtccaaactcatcaatgtatcttagcttaacgggcggcgaaggagaagtccacgcctacatgggggtagagtcataatcgtgcatcaggatagggcggtggtgctgcagcagcgcgcgaataaactgctgccgccgccgctccgtcctgcaggaatacaacatggcagtggtctcctcagcgatgattcgcaccgcccgcagcataaggcgccttgtcctccgggcacagcagcgcaccctgatctcacttaaatcagcacagtaactgcagcacagcaccacaatattgttcaaaatcccacagtgcaaggcgctgtatccaaagctcatggcggggaccacagaacccacgtggccatcataccacaagcgcaggtagattaagtggcgacccctcataaacacgctggacataaacattacctcttttggcatgttgtaattcaccacctcccggtaccatataaacctctgattaaacatggcgccatccaccaccatcctaaaccagctggccaaaacctgcccgccggctatacactgcagggaaccgggactggaacaatgacagtggagagcccaggactcgtaaccatggatcatcatgctcgtcatgatatcaatgttggcacaacacaggcacacgtgcatacacttcctcaggattacaagctcctcccgcgttagaaccatatcccagggaacaacccattcctgaatcagcgtaaatcccacactgcagggaagacctcgcacgtaactcacgttgtgcattgtcaaagtgttacattcgggcagcagcggatgatcctccagtatggtagcgcgggtttctgtctcaaaaggaggtagacgatccctactgtacggagtgcgccgagacaaccgagatcgtgttggtcgtagtgtcatgccaaatggaacgccggacgtagtcatatttcctgaagcaaaaccaggtgcgggcgtgacaaacagatctgcgtctccggtctcgccgcttagatcgctctgtgtagtagttgtagtatatccactctctcaaagcatccaggcgccccctggcttcgggttctatgtaaactccttcatgcgccgctgccctgataacatccaccaccgcagaataagccacacccagccaacctacacattcgttctgcgagtcacacacgggaggagcgggaagagctggaagaaccatgtttttttttttattccaaaagattatccaaaacctcaaaatgaagatctattaagtgaacgcgctcccctccggtggcgtggtcaaactctacagccaaagaacagataatggcatttgtaagatgttgcacaatggcttccaaaaggcaaacggccctcacgtccaagtggacgtaaaggctaaacccttcagggtgaatctcctctataaacattccagcaccttcaaccatgcccaaataattctcatctcgccaccttctcaatatatctctaagcaaatcccgaatattaagtccggccattgtaaaaatctgctccagagcgccctccaccttcagcctcaagcagcgaatcatgattgcaaaaattcaggttcctcacagacctgtataagattcaaaagcggaacattaacaaaaataccgcgatcccgtaggtcccttcgcagggccagctgaacataatcgtgcaggtctgcacggaccagcgcggccacttccccgccaggaaccatgacaaaagaacccacactgattatgacacgcatactcggagctatgctaaccagcgtagccccgatgtaagcttgttgcatgggcggcgatataaaatgcaaggtgctgctcaaaaaatcaggcaaagcctcgcgcaaaaaagaaagcacatcgtagtcatgctcatgcagataaaggcaggtaagctccggaaccaccacagaaaaagacaccatttttctctcaaacatgtctgcgggtttctgcataaacacaaaataaaataacaaaaaaacatttaaacattagaagcctgtcttacaacaggaaaaacaacccttataagcataagacggactacggccatgccggcgtgaccgtaaaaaaactggtcaccgtgattaaaaagcaccaccgacagctcctcggtcatgtccggagtcataatgtaagactcggtaaacacatcaggttgattcacatcggtcagtgctaaaaagcgaccgaaatagcccgggggaatacatacccgcaggcgtagagacaacattacagcccccataggaggtataacaaaattaataggagagaaaaacacataaacacctgaaaaaccctcctgcctaggcaaaatagcaccctcccgctccagaacaacatacagcgcttccacagcggcagccataacagtcagccttaccagtaaaaaagaaaacctattaaaaaaacaccactcgacacggcaccagctcaatcagtcacagtgtaaaaaagggccaagtgcagagcgagtatatataggactaaaaaatgacgtaacggttaaagtccacaaaaaacacccagaaaaccgcacgcgaacctacgcccagaaacgaaagccaaaaaacccacaacttcctcaaatcgtcacttccgttttcccacgttacgtcacttcccattttaagaaaactacaattcccaacacatacaagttactccgcccttaattaaatcggatccgatatctagatgtattcgcgaggtaccgagctcgaattctctggccgtcgttttacaacgtcgtgactgggaaaaccctggcgttacccaacttaatcgccttgcagcacatccccctttcgccagctggcgtaatagcgaagaggcccgcaccgatcgcccttcccaacagttgcgcagcctgaatggcgaatggcgcctgatgcggtattttctccttacgcatctgtgcggtatttcacaccgcatatggtgcactctcagtacaatctgctctgatgccgcatagttaagccagccccgacacccgccaacacccgctgacgcgccctgacgggcttgtctgctcccggcatccgcttacagacaagctgtgaccgtctccgggagctgcatgtgtcagaggttttcaccgtcatcaccgaaacgcgcga

SEQ ID NO: 63 - DNA, 15128 bp, Artificial Sequence
  Description of Artificial Sequence: Synthetic polynucleotide
tgcagctctggcccgtgtctcaaaatctctgatgttacattgcacaagataaaaatatatcatcatgaacaataaaactgtctgcttacataaacagtaatacaaggggtgttatgagccatattcaacgggaaacgtcgaggccgcgattaaattccaacatggatgctgatttatatgggtataaatgggctcgcgataatgtcgggcaatcaggtgcgacaatctatcgcttgtatgggaagcccgatgcgccagagttgtttctgaaacatggcaaaggtagcgttgccaatgatgttacagatgagatggtcagactaaactggctgacggaatttatgcctcttccgaccatcaagcattttatccgtactcctgatgatgcatggttactcaccactgcgatccccggaaaaacagcattccaggtattagaagaatatcctgattcaggtgaaaatattgttgatgcgctggcagtgttcctgcgccggttgcattcgattcctgtttgtaattgtccttttaacagcgatcgcgtatttcgtctcgctcaggcgcaatcacgaatgaataacggtttggttgatgcgagtgattttgatgacgagcgtaatggctggcctgttgaacaagtctggaaagaaatgcataaacttttgccattctcaccggattcagtcgtcactcatggtgatttctcacttgataaccttatttttgacgaggggaaattaataggttgtattgatgttggacgagtcggaatcgcagaccgataccaggatcttgccatcctatggaactgcctcggtgagttttctccttcattacagaaacggctttttcaaaaatatggtattgataatcctgatatgaataaattgcagtttcatttgatgctcgatgagtttttctaatcagaattggttaattggttgtaacattattcagattgggcttgatttaaaacttcatttttaatttaaaaggatctaggtgaagatcctttttgataatctcatgaccaaaatcccttaacgtgagttttcgttccactgagcgtcagaccccgtagaaaagatcaaaggatcttcttgagatcctttttttctgcgcgtaatctgctgcttgcaaacaaaaaaaccaccgctaccagcggtggtttgtttgccggatcaagagctaccaactctttttccgaaggtaactggcttcagcagagcgcagataccaaatactgttcttctagtgtagccgtagttaggccaccacttcaagaactctgtagcaccgcctacatacctcgctctgctaatcctgttaccagtggctgctgccagtggcgataagtcgtgtcttaccgggttggactcaagacgatagttaccggataaggcgcagcggtcgggctgaacggggggttcgtgcacacagcccagcttggagcgaacgacctacaccgaactgagatacctacagcgtgagctatgagaaagcgccacgcttcccgaagggagaaaggcggacaggtatccggtaagcggcagggtcggaacaggagagcgcacgagggagcttccagggggaaacgcctggtatctttatagtcctgtcgggtttcgccacctctgacttgagcgtcgatttttgtgatgctcgtcaggggggcggagcctatggaaaaacgccagcaacgcggcctttttacggttcctggccttttgctggccttttgctcacatgttctttcctgcgttatcccctgattctgtggataaccgtattaccgcctttgagtgagctgataccgctcgccgcagccgaacgaccgagcgcagcgagtcagtgagcgaggaagcggaagagcgcccaatacgcaaaccgcctctccccgcgcgttggccgattcattaatgcagctggcacgacaggtttcccgactggaaagcgggcagtgagcgcaacgcaattaatgtgagttagctcactcattaggcaccccaggctttacactttatgcttccggctcgtatgttgtgtggaattgtgagcggataacaatttcacacaggaaacagctatgaccatgattacaccaagcttgcatgcaggcctctgcagtcgaccagaagcaccatgtccttgggtccggcctgctgaatgcgcaggcggtcggccatgccccaggcttcgttttgacatcggcgcaggtctttgtagtagtcttgcatgagcctttctaccggcacttcttcttctccttcctcttgtcctgcatctcttgcatctatcgctgcggcggcggcggagtttggccgtaggtggcgccctcttcctcccatgcgtgtgaccccgaagcccctcatcggctgaagcagggctaggtcggcgacaacgcgctcggctaatatggcctgctgcacctgcgtgagggtagactggaagtcatccatgtccacaaagcggtggtatgcgcccgtgttgatggtgtaagtgcagttggccataacggaccagttaacggtctggtgacccggctgcgagagctcggtgtacctgagacgcgagtaagccctcgagtcaaatacgtagtcgttgcaagtccgcaccaggtactggtatcccaccaaaaagtgcggcggcggctggcggtagaggggccagcgtagggtggccggggctccgggggcgagatcttccaacataaggcgatgatatccgtagatgtacctggacatccaggtgatgccggcggcggtggtggaggcgcgcggaaagtcgcggacgcggttccagatgttgcgcagcggcaaaaagtgctccatggtcgggacgctctggccggtcaggcgcgcgcaatcgttgacgctctagcgtgcaaaaggagagcctgtaagcgggcactcttccgtggtctggtggataaattcgcaagggtatcatggcggacgaccggggttcgagccccgtatccggccgtccgccgtgatccatgcggttaccgcccgcgtgtcgaacccaggtgtgcgacgtcagacaacgggggagtgctccttttggcttccttccaggcgcggcggctgctgcgctagcttttttggccactggccgcgcgcagcgtaagcggttaggctggaaagcgaaagcattaagtggctcgctccctgtagccggagggttattttccaagggttgagtcgcgggacccccggttcgagtctcggaccgagactgggggcgtacactggatggcctttgcctggaacccgcactcaaaaacatgctacctctttgagccctttggcttttctgaccagcgactcaagcaggtttaccagtttgagtacgagtcactcctgcgccgtagcgccattgcttcttcccccgaccgctgtataacgctggaaaagtccacccaaagcgtacaggggcccaactcggccgcctgtggactattctgctgcatgtttctccacgcctttgccaactggccccaaactcccatggatcacaaccccaccatgaaccttattaccggggtacccaactccatgctcaacagtccccaggtacagcccaccctgcgtcgcaaccaggaacagctctacagcttcctggagcgccactcgccctacttccgcagccacagtgcgcagattaggagcgccacttctttttgtcacttgaaaaacatgtaaaaataatgtactagagacactttcaataaaggcaaatgcttttatttgtacactctcgggtgattatttacccccacccttgccgtctgcgccgtttaaaaatcaaaggggttctgccgcgcatcgctatgcgccactggcagggacacgttgcgatactggtgtttagtgctccacttaaactcaggcacaaccatccgcggcagctcggtgaagttttcactccacaggctgcgcaccatcaccaacgcgtttagcaggtcgggcgccgatatcttgaagtcgcagttggggcctccgccctgcgcgcgcgagttgcgatacacagggttgcagcactggaacactatcagcgccgggtggtgcacgctggccagcacgctcttgtcggagatcagatccgcgtccaggtcctccgcgttgctcagggcgaacggagtcaactttggtagctgccttcccaaaaagggcgcgtgcccaggctttgagttgcactcgcaccgtagtggcatcaaaaggtgaccgtgcccggtctgggcgttaggatacagcgcctgcataaaagccttgatctgcttaaaagccacctgagcctttgcgccttcagagaagaacatgccgcaagacttgccggaaaactgattggccggacaggccgcgtcgtgcacgcagcaccttgcgtcggtgttggagatctgcaccacatttcggccccaccggttcttcacgatcttggccttgctagactgctccttcagcgcgcgctgcccgttttcgctcgtcacatccatttcaatcacgtgctccttatttatcataatgcttccgtgtagacacttaagctcgccttcgatctcagcgcagcggtgcagccacaacgcgcagcccgtgggctcgtgatgcttgtaggtcacctctgcaaacgactgcaggtacgcctgcaggaatcgccccatcatcgtcacaaaggtcttgttgctggtgaaggtcagctgcaacccgcggtgctcctcgttcagccaggtcttgcatacggccgccagagcttccacttggtcaggcagtagtttgaagttcgcctttagatcgttatccacgtggtacttgtccatcagcgcgcgcgcagcctccatgcccttctcccacgcagacacgatcggcacactcagcgggttcatcaccgtaatttcactttccgcttcgctgggctcttcctcttcctcttgcgtccgcataccacgcgccactgggtcgtcttcattcagccgccgcactgtgcgcttacctcctttgccatgcttgattagcaccggtgggttgctgaaacccaccatttgtagcgccacatcttctctttcttcctcgctgtccacgattacctctggtgatggcgggcgctcgggcttgggagaagggcgcttctttttcttcttgggcgcaatggccaaatccgccgccgaggtcgatggccgcgggctgggtgtgcgcggcaccagcgcgtcttgtgatgagtcttcctcgtcctcggactcgatacgccgcctcatccgcttttttgggggcgcccggggaggcggcggcgacggggacggggacgacacgtcctccatggttgggggacgtcgcgccgcaccgcgtccgcgctcgggggtggtttcgcgctgctcctcttcccgactggccatttccttctcctataggcagaaaaagatccacaaaagcgaagatcagcttcggcgcacgctggaagacgcggaggctctcttcagtaaatactgcgcgctgactcttaaggactagtttcgcgccctttctcaaatttaagcgcgaaaactacgtcatctccagcggccacacccggcgccagcacctgttgtcagcgccattggcgcgcccgcccgccgcgcgcttcgctttttatagggccgccgccgccgccgcctcgccataaaaggaaactttcggagcgcgccgctctgattggctgccgccgcacctctccgcctcgccccgccccgcccctcgccccgccccgccccgcctggcgcgcgccccccccccccccccgcccccatcgctgcacaaaataattaaaaaataaataaatacaaaattgggggtggggaggggggggagatggggagagtgaagcagaacgtggggctcacctcgaggccggccgaatatcttcatttaaatgtgtgtcagttagggtgtggaaagtccccaggctccccagcaggcagaagtatgcaaagcatgcatctcaattagtcagcaaccaggtgtggaaagtccccaggctccccagcaggcagaagtatgcaaagcatgcatctcaattagtcagcaaccatagtcccgcccctaactccgcccatcccgcccctaactccgcccagttccgcccattctccgccccatggctgactaattttttttatttatgcagaggccgaggccgcctcggcctctgagctattccagaagtagtgaggaggcttttttggaggcctaggcttttgcaaacgccggcgcaccgcgggcccgatccaccggtactgttggtaaagccaccatgttttccggtggcggcggcccgctgtcccccggaggaaagtcggcggccagggcggcgtccgggttttttgcgcccgccggccctcgcggagccagccggggacccccgccttgtttgaggcaaaacttttacaacccctacctcgccccagtcgggacgcaacagaagccgaccgggccaacccagcgccatacgtactatagcgaatgcgatgaatttcgattcatcgccccgcgggtgctggacgaggatgcccccccggagaagcgcgccggggtgcacgacggtcacctcaagcgcgcccccaaggtgtactgcgggggggacgagcgcgacgtcctccgcgtcgggtcgggcggcttctggccgcggcgctcgcgcctgtggggcggcgtggaccacgccccggcggggttcaaccccaccgtcaccgtctttcacgtgtacgacatcctggagaacgtggagcacgcgtacggcatgcgcgcggcccagttccacgcgcggtttatggacgccatcacaccgacggggaccgtcatcacgctcctgggcctgactccggaaggccaccgggtggccgttcacgtttacggcacgcggcagtacttttacatgaacaaggaggaggtcgacaggcacctacaatgccgcgccccacgagatctctgcgagcgcatggccgcggccctgcgcgagtccccgggcgcgtcgttccgcggcatctccgcggaccacttcgaggcggaggtggtggagcgcaccgacgtgtactactacgagacgcgccccgctctgttttaccgcgtctacgtccgaagcgggcgcgtgctgtcgtacctgtgcgacaacttctgcccggccatcaagaagtacgagggtggggtcgacgccaccacccggttcatcctggacaaccccgggttcgtcaccttcggctggtaccgtctcaaaccgggccggaacaacacgctagcccagccgcgggccccgatggccttcgggacatccagcgacgtcgagtttaactgtacggcggacaacctggccatcgaggggggcatgagcgacctaccggcatacaagctcatgtgcttcgatatcgaatgcaaggcggggggggaggacgagctggcctttccggtggccgggcacccggaggacctggtcatccagatatcctgtctgctctacgacctgtccaccaccgccctggagcacgtcctcctgttttcgctcggttcctgcgacctccccgaatcccacctgaacgagctggcggccaggggcctgcccacgcccgtggttctggaattcgacagcgaattcgagatgctgttggccttcatgacccttgtgaaacagtacggccccgagttcgtgaccgggtacaacatcatcaacttcgactggcccttcttgctggccaagctgacggacatttacaaggtccccctggacgggtacggccgcatgaacggccggggcgtgtttcgcgtgtgggacataggccagagccacttccagaagcgcagcaagataaaggtgaacggcatggtgaacatcgacatgtacgggattataaccgacaagatcaagctctcgagctacaagctcaacgccgtggccgaagccgtcctgaaggacaagaagaaggacctgagctatcgcgacatccccgcctactacgccgccgggcccgcgcaacgcggggtgatcggcgagtactgcatacaggattccctgctggtgggccagctgttttttaagtttttgccccatctggagctctcggccgtcgcgcgcttggcgggtattaacatcacccgcaccatctacgacggccagcagatccgcgtctttacgtgcctgctgcgcctggccgaccagaagggctttattctgccggacacccaggggcgatttaggggcgccgggggggaggcgcccaagcgtccggccgcagcccgggaggacgaggagcggccagaggaggagggggaggacgaggacgaacgcgaggagggcgggggcgagcgggagccggagggcgcgcgggagaccgccggcaggcacgtggggtaccagggggccagggtccttgaccccacttccgggtttcacgtgaaccccgtggtggtgttcgactttgccagcctgtaccccagcatcatccaggcccacaacctgtgcttcagcacgctctccctgagggccgacgcagtggcgcacctggaggcgggcaaggactacctggagatcgaggtgggggggcgacggctgttcttcgtcaaggctcacgtgcgagagagcctcctcagcatcctcctgcgggactggctcgccatgcgaaagcagatccgctcgcggattccccagagcagccccgaggaggccgtgctcctggacaagcagcaggccgccatcaaggtcgtgtgtaactcggtgtacgggttcacgggagtgcagcacggactcctgccgtgcctgcacgttgccgcgacggtgacgaccatcggccgcgagatgctgctcgcgacccgcgagtacgtccacgcgcgctgggcggccttcgaacagctcctggccgatttcccggaggcggccgacatgcgcgcccccgggccctattccatgcgcatcatctacggggacacggactccatctttgtgctgtgccgcggcctcacggccgccgggctgacggccgtgggcgacaagatggcgagccacatctcgcgcgcgctgtttctgccccccatcaaactcgagtgcgaaaagacgttcaccaagctgctgctgatcgccaagaaaaagtacatcggcgtcatctacgggggtaagatgctcatcaagggcgtggatctggtgcgcaaaaacaactgcgcgtttatcaaccgcacctccagggccctggtcgacctgctgttttacgacgataccgtctccggagccgccgcggcgttagccgagcgccccgcggaggagtggctggcgcgacccctgcccgagggactgcaggcgttcggggccgtcctcgtagacgcccatcggcgcatcaccgacccggagagggacatccaggactttgtcctcaccgccgaactgagcagacacccgcgcgcgtacaccaacaagcgcctggcccacctgacggtgtattacaagctcatggcccgccgcgcgcaggtcccgtccatcaaggaccggatcccgtacgtgatcgtggcccagacccgcgaggtagaggagacggtcgcgcggctggccgccctccgcgagctagacgccgccgccccaggggacgagcccgccccccccgcggccctgccctccccggccaagcgcccccgggagacgccgtcgcctgccgaccccccgggaggcgcgtccaagccccgcaagctgctggtgtccgagctggccgaggatcccgcatacgccattgcccacggcgtcgccctgaacacggactattacttctcccacctgttgggggcggcgtgcgtgacattcaaggccctgtttgggaataacgccaagatcaccgagagtctgttaaaaaggtttattcccgaagtgtggcaccccccggacgacgtggccgcgcggctccggaccgcagggttcggggcggtgggtgccggcgctacggcggaggaaactcgtcgaatgttgcatagagcctttgatactctagcagaattcggcagtggagcaacaaacttctctctgctgaaacaagccggagatgtcgaagagaatcctggaccgacggattcccctggcggtgtggcccccgcctcccccgtggaggacgcgtcggacgcgtccctcgggcagccggaggagggggcgccctgccaggtggtcctgcagggcgccgaacttaatggaatcctacaggcgtttgccccgctgcgcacgagccttctggactcgcttctggttatgggcgaccggggcatccttatccataacacgatctttggggagcaggtgttcctgcccctggaacactcgcaattcagtcggtatcgctggcgcggacccacggcggcgttcctgtctctcgtggaccagaagcgctccctcctgagcgtgtttcgcgccaaccagtacccggacctacgtcgggtggagttggcgatcacgggccaggccccgtttcgcacgctggttcagcgcatatggacgacgacgtccgacggcgaggccgttgagctagccagcgagacgctgatgaagcgcgaactgacgagctttgtggtgctggttccccagggaacccccgacgttcagttgcgcctgacgaggccgcagctcaccaaggtccttaacgcgaccggggccgatagtgccacgcccaccacgttcgagctcggggttaacggcaaattttccgtgttcaccacgagtacctgcgtcacctttgctgcccgcgaggagggcgtgtcgtccagcaccagcacccaggtccagatcctgtccaacgcgctcaccaaggcgggccaggccgccgcgaacgccaagacggtgtacggggaaaatacccatcgcaccttctctgtggtcgtcgacgattgcagcatgcgggcggtgctccggcgactgcaggtcggcgggggcaccctcaagttcttcctcacgacccccgtccccagtctgtgcgtcaccgccaccggtcccaacgcggtatcggcggtatttctcctgaaaccccagaagatttgcctggactggctgggtcatagccaggggtctccttcagccgggagctcggcctcccgggcctctgggagcgagccaacagacagccaggactccgcgtcggacgcggtcagccacggcgatccggaagacctcgatggcgctgcccgggcgggagaggcgggggccttgcatgcctgtccgatgccgtcgtcgaccacgcgggtcactcccacgaccaagcgggggcgctcggggggcgaggatgcgcgcgcggacacggccctaaagaaacctaagacggggtcgcccaccgcacccccgcccgcagatccagtccccctggacacggaggacgactccgatgcggcggacgggacggcggcccgtcccgccgctccagacgcccggagcggaagccgttacgcgtgttactttcgcgacctcccgaccggagaagcaagccccggcgccttctccgccttccgggggggcccccaaaccccgtatggttttggattcccctgataggatccgactgcaggtagctgtgccttctagttgccagccatctgttgtttgcccctcccccgtgccttccttgaccctggaaggtgccactcccactgtcctttcctaataaaatgaggaaattgcatcgcattgtctgagtaggtgtcattctattctggggggtggggtggggcaggacagcaagggggaggattgggaagacaatagcaggcatgctggggatgcggtgggctctatgggtttaaacatcgatgcggccgcaacttgtttattgcagcttataatggttacaaataaagcaatagcatcacaaatttcacaaataaagcatttttttcactgcattctagttgtggtttgtccaaactcatcaatgtatcttagcttaacgggcggcgaaggagaagtccacgcctacatgggggtagagtcataatcgtgcatcaggatagggcggtggtgctgcagcagcgcgcgaataaactgctgccgccgccgctccgtcctgcaggaatacaacatggcagtggtctcctcagcgatgattcgcaccgcccgcagcataaggcgccttgtcctccgggcacagcagcgcaccctgatctcacttaaatcagcacagtaactgcagcacagcaccacaatattgttcaaaatcccacagtgcaaggcgctgtatccaaagctcatggcggggaccacagaacccacgtggccatcataccacaagcgcaggtagattaagtggcgacccctcataaacacgctggacataaacattacctcttttggcatgttgtaattcaccacctcccggtaccatataaacctctgattaaacatggcgccatccaccaccatcctaaaccagctggccaaaacctgcccgccggctatacactgcagggaaccgggactggaacaatgacagtggagagcccaggactcgtaaccatggatcatcatgctcgtcatgatatcaatgttggcacaacacaggcacacgtgcatacacttcctcaggattacaagctcctcccgcgttagaaccatatcccagggaacaacccattcctgaatcagcgtaaatcccacactgcagggaagacctcgcacgtaactcacgttgtgcattgtcaaagtgttacattcgggcagcagcggatgatcctccagtatggtagcgcgggtttctgtctcaaaaggaggtagacgatccctactgtacggagtgcgccgagacaaccgagatcgtgttggtcgtagtgtcatgccaaatggaacgccggacgtagtcatatttcctgaagcaaaaccaggtgcgggcgtgacaaacagatctgcgtctccggtctcgccgcttagatcgctctgtgtagtagttgtagtatatccactctctcaaagcatccaggcgccccctggcttcgggttctatgtaaactccttcatgcgccgctgccctgataacatccaccaccgcagaataagccacacccagccaacctacacattcgttctgcgagtcacacacgggaggagcgggaagagctggaagaaccatgtttttttttttattccaaaagattatccaaaacctcaaaatgaagatctattaagtgaacgcgctcccctccggtggcgtggtcaaactctacagccaaagaacagataatggcatttgtaagatgttgcacaatggcttccaaaaggcaaacggccctcacgtccaagtggacgtaaaggctaaacccttcagggtgaatctcctctataaacattccagcaccttcaaccatgcccaaataattctcatctcgccaccttctcaatatatctctaagcaaatcccgaatattaagtccggccattgtaaaaatctgctccagagcgccctccaccttcagcctcaagcagcgaatcatgattgcaaaaattcaggttcctcacagacctgtataagattcaaaagcggaacattaacaaaaataccgcgatcccgtaggtcccttcgcagggccagctgaacataatcgtgcaggtctgcacggaccagcgcggccacttccccgccaggaaccatgacaaaagaacccacactgattatgacacgcatactcggagctatgctaaccagcgtagccccgatgtaagcttgttgcatgggcggcgatataaaatgcaaggtgctgctcaaaaaatcaggcaaagcctcgcgcaaaaaagaaagcacatcgtagtcatgctcatgcagataaaggcaggtaagctccggaaccaccacagaaaaagacaccatttttctctcaaacatgtctgcgggtttctgcataaacacaaaataaaataacaaaaaaacatttaaacattagaagcctgtcttacaacaggaaaaacaacccttataagcataagacggactacggccatgccggcgtgaccgtaaaaaaactggtcaccgtgattaaaaagcaccaccgacagctcctcggtcatgtccggagtcataatgtaagactcggtaaacacatcaggttgattcacatcggtcagtgctaaaaagcgaccgaaatagcccgggggaatacatacccgcaggcgtagagacaacattacagcccccataggaggtataacaaaattaataggagagaaaaacacataaacacctgaaaaaccctcctgcctaggcaaaatagcaccctcccgctccagaacaacatacagcgcttccacagcggcagccatggtggcatttgcaaaagcctaggcctccaaaaaagcctcctcactacttctggaatagctcagaggccgaggcggcctcggcctctgcataaataaaaaaaattagtcagccatggggcggagaatgggcggaactgggcggagttaggggcgggatgggcggagttaggggcgggactatggttgctgactaattgagatgcatgctttgcatacttctgcctgctggggagcctggggactttccacacctggttgctgactaattgagatgcatgctttgcatacttctgcctgctggggagcctggggactttccacaccctaactgacacacacgttacgtcacttcccattttaagaaaactacaattcccaacacatacaagttactccgcccttaattaaatcggatccgatatctagatgtattcgcgaggtaccgagctcgaattctctggccgtcgttttacaacgtcgtgactgggaaaaccctggcgttacccaacttaatcgccttgcagcacatccccctttcgccagctggcgtaatagcgaagaggcccgcaccgatcgcccttcccaacagttgcgcagcctgaatggcgaatggcgcctgatgcggtattttctccttacgcatctgtgcggtatttcacaccgcatatggtgcactctcagtacaatctgctctgatgccgcatagttaagccagccccgacacccgccaacacccgctgacgcgccctgacgggcttgtctgctcccggcatccgcttacagacaagctgtgaccgtctccgggagctgcatgtgtcagaggttttcaccgtcatcaccgaaacgcgcga

SEQ ID NO: 64 - DNA, 14364 bp, Artificial Sequence
  Description of Artificial Sequence: Synthetic polynucleotide
tgcagctctggcccgtgtctcaaaatctctgatgttacattgcacaagataaaaatatatcatcatgaacaataaaactgtctgcttacataaacagtaatacaaggggtgttatgagccatattcaacgggaaacgtcgaggccgcgattaaattccaacatggatgctgatttatatgggtataaatgggctcgcgataatgtcgggcaatcaggtgcgacaatctatcgcttgtatgggaagcccgatgcgccagagttgtttctgaaacatggcaaaggtagcgttgccaatgatgttacagatgagatggtcagactaaactggctgacggaatttatgcctcttccgaccatcaagcattttatccgtactcctgatgatgcatggttactcaccactgcgatccccggaaaaacagcattccaggtattagaagaatatcctgattcaggtgaaaatattgttgatgcgctggcagtgttcctgcgccggttgcattcgattcctgtttgtaattgtccttttaacagcgatcgcgtatttcgtctcgctcaggcgcaatcacgaatgaataacggtttggttgatgcgagtgattttgatgacgagcgtaatggctggcctgttgaacaagtctggaaagaaatgcataaacttttgccattctcaccggattcagtcgtcactcatggtgatttctcacttgataaccttatttttgacgaggggaaattaataggttgtattgatgttggacgagtcggaatcgcagaccgataccaggatcttgccatcctatggaactgcctcggtgagttttctccttcattacagaaacggctttttcaaaaatatggtattgataatcctgatatgaataaattgcagtttcatttgatgctcgatgagtttttctaatcagaattggttaattggttgtaacattattcagattgggcttgatttaaaacttcatttttaatttaaaaggatctaggtgaagatcctttttgataatctcatgaccaaaatcccttaacgtgagttttcgttccactgagcgtcagaccccgtagaaaagatcaaaggatcttcttgagatcctttttttctgcgcgtaatctgctgcttgcaaacaaaaaaaccaccgctaccagcggtggtttgtttgccggatcaagagctaccaactctttttccgaaggtaactggcttcagcagagcgcagataccaaatactgttcttctagtgtagccgtagttaggccaccacttcaagaactctgtagcaccgcctacatacctcgctctgctaatcctgttaccagtggctgctgccagtggcgataagtcgtgtcttaccgggttggactcaagacgatagttaccggataaggcgcagcggtcgggctgaacggggggttcgtgcacacagcccagcttggagcgaacgacctacaccgaactgagatacctacagcgtgagctatgagaaagcgccacgcttcccgaagggagaaaggcggacaggtatccggtaagcggcagggtcggaacaggagagcgcacgagggagcttccagggggaaacgcctggtatctttatagtcctgtcgggtttcgccacctctgacttgagcgtcgatttttgtgatgctcgtcaggggggcggagcctatggaaaaacgccagcaacgcggcctttttacggttcctggccttttgctggccttttgctcacatgttctttcctgcgttatcccctgattctgtggataaccgtattaccgcctttgagtgagctgataccgctcgccgcagccgaacgaccgagcgcagcgagtcagtgagcgaggaagcggaagagcgcccaatacgcaaaccgcctctccccgcgcgttggccgattcattaatgcagctggcacgacaggtttcccgactggaaagcgggcagtgagcgcaacgcaattaatgtgagttagctcactcattaggcaccccaggctttacactttatgcttccggctcgtatgttgtgtggaattgtgagcggataacaatttcacacaggaaacagctatgaccatgattacaccaagcttgcatgcaggcctatccgtagatgtacctggacatccaggtgatgccggcggcggtggtggaggcgcgcggaaagtcgcggacgcggttccagatgttgcgcagcggcaaaaagtgctccatggtcgggacgctctggccggtgaggcgtgcgcagtcgttgacgctctagaccgtgcaaaaggagagcctgtaagcgggcactcttccgtggtctggtggataaattcgcaagggtatcatggcggacgaccggggttcgaaccccggatccggccgtccgccgtgatccatgcggttaccgcccgcgtgtcgaacccaggtgtgcgacgtcagacaacgggggagcgctccttttggcttccttccaggcgcggcggctgctgcgctagcttttttggccactggccgcgcgcggcgtaagcggttaggctggaaagcgaaagcattaagtggctcgctccctgtagccggagggttattttccaagggttgagtcgcaggacccccggttcgagtctcgggccggccggactgcggcgaacgggggtttgcctccccgtcatgcaagaccccgcttgcaaattcctccggaaacagggacgagccccttttttgcttttcccagatgcatccggtgctgcggcagatgcgcccccctcctcagcagcggcaagagcaagagcagcggcagacatgcagggcaccctccccttctcctaccgcgtcaggaggggcaacatcgatccagacatgataagatacattgatgagtttggacaaaccacaactagaatgcagtgaaaaaaatgctttatttgtgaaatttgtgatgctattgctttatttgtaaccattataagctgcaataaacaagtttgtacactctcgggtgattatttacccccacccttgccgtctgcgccgtttaaaaatcaaaggggttctgccgcgcatcgctatgcgccactggcagggacacgttgcgatactggtgtttagtgctccacttaaactcaggcacaaccatccgcggcagctcggtgaagttttcactccacaggctgcgcaccatcaccaacgcgtttagcaggtcgggcgccgatatcttgaagtcgcagttggggcctccgccctgcgcgcgcgagttgcgatacacagggttgcagcactggaacactatcagcgccgggtggtgcacgctggccagcacgctcttgtcggagatcagatccgcgtccaggtcctccgcgttgctcagggcgaacggagtcaactttggtagctgccttcccaaaaagggcgcgtgcccaggctttgagttgcactcgcaccgtagtggcatcaaaaggtgaccgtgcccggtctgggcgttaggatacagcgcctgcataaaagccttgatctgcttaaaagccacctgagcctttgcgccttcagagaagaacatgccgcaagacttgccggaaaactgattggccggacaggccgcgtcgtgcacgcagcaccttgcgtcggtgttggagatctgcaccacatttcggccccaccggttcttcacgatcttggccttgctagactgctccttcagcgcgcgctgcccgttttcgctcgtcacatccatttcaatcacgtgctccttatttatcataatgcttccgtgtagacacttaagctcgccttcgatctcagcgcagcggtgcagccacaacgcgcagcccgtgggctcgtgatgcttgtaggtcacctctgcaaacgactgcaggtacgcctgcaggaatcgccccatcatcgtcacaaaggtcttgttgctggtgaaggtcagctgcaacccgcggtgctcctcgttcagccaggtcttgcatacggccgccagagcttccacttggtcaggcagtagtttgaagttcgcctttagatcgttatccacgtggtacttgtccatcagcgcgcgcgcagcctccatgcccttctcccacgcagacacgatcggcacactcagcgggttcatcaccgtaatttcactttccgcttcgctgggctcttcctcttcctcttgcgtccgcataccacgcgccactgggtcgtcttcattcagccgccgcactgtgcgcttacctcctttgccatgcttgattagcaccggtgggttgctgaaacccaccatttgtagcgccacatcttctctttcttcctcgctgtccacgattacctctggtgatggcgggcgctcgggcttgggagaagggcgcttctttttcttcttgggcgcaatggccaaatccgccgccgaggtcgatggccgcgggctgggtgtgcgcggcaccagcgcgtcttgtgatgagtcttcctcgtcctcggactcgatacgccgcctcatccgcttttttgggggcgcccggggaggcggcggcgacggggacggggacgacacgtcctccatggttgggggacgtcgcgccgcaccgcgtccgcgctcgggggtggtttcgcgctgctcctcttcccgactggccatttccttctcctataggcagaaaaagatccacaaaagcgaagatcagcttcggcgcacgctggaagacgcggaggctctcttcagtaaatactgcgcgctgactcttaaggactagtttcgcgccctttctcaaatttaagcgcgaaaactacgtcatctccagcggccacacccggcgccagcacctgttgtcagcgccattggcgcgcccgcccgccgcgcgcttcgctttttatagggccgccgccgccgccgcctcgccataaaaggaaactttcggagcgcgccgctctgattggctgccgccgcacctctccgcctcgccccgccccgcccctcgccccgccccgccccgcctggcgcgcgccccccccccccccccgcccccatcgctgcacaaaataattaaaaaataaataaatacaaaattgggggtggggaggggggggagatggggagagtgaagcagaacgtggggctcacctcgaggccggccgaatatcttcatttaaatgtgtgtcagttagggtgtggaaagtccccaggctccccagcaggcagaagtatgcaaagcatgcatctcaattagtcagcaaccaggtgtggaaagtccccaggctccccagcaggcagaagtatgcaaagcatgcatctcaattagtcagcaaccatagtcccgcccctaactccgcccatcccgcccctaactccgcccagttccgcccattctccgccccatggctgactaattttttttatttatgcagaggccgaggccgcctcggcctctgagctattccagaagtagtgaggaggcttttttggaggcctaggcttttgcaaacgccggcgcaccgcgggcccgatccaccggtactgttggtaaagccaccatgttttccggtggcggcggcccgctgtcccccggaggaaagtcggcggccagggcggcgtccgggttttttgcgcccgccggccctcgcggagccagccggggacccccgccttgtttgaggcaaaacttttacaacccctacctcgccccagtcgggacgcaacagaagccgaccgggccaacccagcgccatacgtactatagcgaatgcgatgaatttcgattcatcgccccgcgggtgctggacgaggatgcccccccggagaagcgcgccggggtgcacgacggtcacctcaagcgcgcccccaaggtgtactgcgggggggacgagcgcgacgtcctccgcgtcgggtcgggcggcttctggccgcggcgctcgcgcctgtggggcggcgtggaccacgccccggcggggttcaaccccaccgtcaccgtctttcacgtgtacgacatcctggagaacgtggagcacgcgtacggcatgcgcgcggcccagttccacgcgcggtttatggacgccatcacaccgacggggaccgtcatcacgctcctgggcctgactccggaaggccaccgggtggccgttcacgtttacggcacgcggcagtacttttacatgaacaaggaggaggtcgacaggcacctacaatgccgcgccccacgagatctctgcgagcgcatggccgcggccctgcgcgagtccccgggcgcgtcgttccgcggcatctccgcggaccacttcgaggcggaggtggtggagcgcaccgacgtgtactactacgagacgcgccccgctctgttttaccgcgtctacgtccgaagcgggcgcgtgctgtcgtacctgtgcgacaacttctgcccggccatcaagaagtacgagggtggggtcgacgccaccacccggttcatcctggacaaccccgggttcgtcaccttcggctggtaccgtctcaaaccgggccggaacaacacgctagcccagccgcgggccccgatggccttcgggacatccagcgacgtcgagtttaactgtacggcggacaacctggccatcgaggggggcatgagcgacctaccggcatacaagctcatgtgcttcgatatcgaatgcaaggcggggggggaggacgagctggcctttccggtggccgggcacccggaggacctggtcatccagatatcctgtctgctctacgacctgtccaccaccgccctggagcacgtcctcctgttttcgctcggttcctgcgacctccccgaatcccacctgaacgagctggcggccaggggcctgcccacgcccgtggttctggaattcgacagcgaattcgagatgctgttggccttcatgacccttgtgaaacagtacggccccgagttcgtgaccgggtacaacatcatcaacttcgactggcccttcttgctggccaagctgacggacatttacaaggtccccctggacgggtacggccgcatgaacggccggggcgtgtttcgcgtgtgggacataggccagagccacttccagaagcgcagcaagataaaggtgaacggcatggtgaacatcgacatgtacgggattataaccgacaagatcaagctctcgagctacaagctcaacgccgtggccgaagccgtcctgaaggacaagaagaaggacctgagctatcgcgacatccccgcctactacgccgccgggcccgcgcaacgcggggtgatcggcgagtactgcatacaggattccctgctggtgggccagctgttttttaagtttttgccccatctggagctctcggccgtcgcgcgcttggcgggtattaacatcacccgcaccatctacgacggccagcagatccgcgtctttacgtgcctgctgcgcctggccgaccagaagggctttattctgccggacacccaggggcgatttaggggcgccgggggggaggcgcccaagcgtccggccgcagcccgggaggacgaggagcggccagaggaggagggggaggacgaggacgaacgcgaggagggcgggggcgagcgggagccggagggcgcgcgggagaccgccggcaggcacgtggggtaccagggggccagggtccttgaccccacttccgggtttcacgtgaaccccgtggtggtgttcgactttgccagcctgtaccccagcatcatccaggcccacaacctgtgcttcagcacgctctccctgagggccgacgcagtggcgcacctggaggcgggcaaggactacctggagatcgaggtgggggggcgacggctgttcttcgtcaaggctcacgtgcgagagagcctcctcagcatcctcctgcgggactggctcgccatgcgaaagcagatccgctcgcggattccccagagcagccccgaggaggccgtgctcctggacaagcagcaggccgccatcaaggtcgtgtgtaactcggtgtacgggttcacgggagtgcagcacggactcctgccgtgcctgcacgttgccgcgacggtgacgaccatcggccgcgagatgctgctcgcgacccgcgagtacgtccacgcgcgctgggcggccttcgaacagctcctggccgatttcccggaggcggccgacatgcgcgcccccgggccctattccatgcgcatcatctacggggacacggactccatctttgtgctgtgccgcggcctcacggccgccgggctgacggccgtgggcgacaagatggcgagccacatctcgcgcgcgctgtttctgccccccatcaaactcgagtgcgaaaagacgttcaccaagctgctgctgatcgccaagaaaaagtacatcggcgtcatctacgggggtaagatgctcatcaagggcgtggatctggtgcgcaaaaacaactgcgcgtttatcaaccgcacctccagggccctggtcgacctgctgttttacgacgataccgtctccggagccgccgcggcgttagccgagcgccccgcggaggagtggctggcgcgacccctgcccgagggactgcaggcgttcggggccgtcctcgtagacgcccatcggcgcatcaccgacccggagagggacatccaggactttgtcctcaccgccgaactgagcagacacccgcgcgcgtacaccaacaagcgcctggcccacctgacggtgtattacaagctcatggcccgccgcgcgcaggtcccgtccatcaaggaccggatcccgtacgtgatcgtggcccagacccgcgaggtagaggagacggtcgcgcggctggccgccctccgcgagctagacgccgccgccccaggggacgagcccgccccccccgcggccctgccctccccggccaagcgcccccgggagacgccgtcgcctgccgaccccccgggaggcgcgtccaagccccgcaagctgctggtgtccgagctggccgaggatcccgcatacgccattgcccacggcgtcgccctgaacacggactattacttctcccacctgttgggggcggcgtgcgtgacattcaaggccctgtttgggaataacgccaagatcaccgagagtctgttaaaaaggtttattcccgaagtgtggcaccccccggacgacgtggccgcgcggctccggaccgcagggttcggggcggtgggtgccggcgctacggcggaggaaactcgtcgaatgttgcatagagcctttgatactctagcagaattcggcagtggagcaacaaacttctctctgctgaaacaagccggagatgtcgaagagaatcctggaccgacggattcccctggcggtgtggcccccgcctcccccgtggaggacgcgtcggacgcgtccctcgggcagccggaggagggggcgccctgccaggtggtcctgcagggcgccgaacttaatggaatcctacaggcgtttgccccgctgcgcacgagccttctggactcgcttctggttatgggcgaccggggcatccttatccataacacgatctttggggagcaggtgttcctgcccctggaacactcgcaattcagtcggtatcgctggcgcggacccacggcggcgttcctgtctctcgtggaccagaagcgctccctcctgagcgtgtttcgcgccaaccagtacccggacctacgtcgggtggagttggcgatcacgggccaggccccgtttcgcacgctggttcagcgcatatggacgacgacgtccgacggcgaggccgttgagctagccagcgagacgctgatgaagcgcgaactgacgagctttgtggtgctggttccccagggaacccccgacgttcagttgcgcctgacgaggccgcagctcaccaaggtccttaacgcgaccggggccgatagtgccacgcccaccacgttcgagctcggggttaacggcaaattttccgtgttcaccacgagtacctgcgtcacctttgctgcccgcgaggagggcgtgtcgtccagcaccagcacccaggtccagatcctgtccaacgcgctcaccaaggcgggccaggccgccgcgaacgccaagacggtgtacggggaaaatacccatcgcaccttctctgtggtcgtcgacgattgcagcatgcgggcggtgctccggcgactgcaggtcggcgggggcaccctcaagttcttcctcacgacccccgtccccagtctgtgcgtcaccgccaccggtcccaacgcggtatcggcggtatttctcctgaaaccccagaagatttgcctggactggctgggtcatagccaggggtctccttcagccgggagctcggcctcccgggcctctgggagcgagccaacagacagccaggactccgcgtcggacgcggtcagccacggcgatccggaagacctcgatggcgctgcccgggcgggagaggcgggggccttgcatgcctgtccgatgccgtcgtcgaccacgcgggtcactcccacgaccaagcgggggcgctcggggggcgaggatgcgcgcgcggacacggccctaaagaaacctaagacggggtcgcccaccgcacccccgcccgcagatccagtccccctggacacggaggacgactccgatgcggcggacgggacggcggcccgtcccgccgctccagacgcccggagcggaagccgttacgcgtgttactttcgcgacctcccgaccggagaagcaagccccggcgccttctccgccttccgggggggcccccaaaccccgtatggttttggattcccctgataggatccgactgcaggtagctgtgccttctagttgccagccatctgttgtttgcccctcccccgtgccttccttgaccctggaaggtgccactcccactgtcctttcctaataaaatgaggaaattgcatcgcattgtctgagtaggtgtcattctattctggggggtggggtggggcaggacagcaagggggaggattgggaagacaatagcaggcatgctggggatgcggtgggctctatgggtttaaacatcgatgcggccgcaacttgtttattgcagcttataatggttacaaataaagcaatagcatcacaaatttcacaaataaagcatttttttcactgcattctagttgtggtttgtccaaactcatcaatgtatcttagcttaacgggcggcgaaggagaagtccacgcctacatgggggtagagtcataatcgtgcatcaggatagggcggtggtgctgcagcagcgcgcgaataaactgctgccgccgccgctccgtcctgcaggaatacaacatggcagtggtctcctcagcgatgattcgcaccgcccgcagcataaggcgccttgtcctccgggcacagcagcgcaccctgatctcacttaaatcagcacagtaactgcagcacagcaccacaatattgttcaaaatcccacagtgcaaggcgctgtatccaaagctcatggcggggaccacagaacccacgtggccatcataccacaagcgcaggtagattaagtggcgacccctcataaacacgctggacataaacattacctcttttggcatgttgtaattcaccacctcccggtaccatataaacctctgattaaacatggcgccatccaccaccatcctaaaccagctggccaaaacctgcccgccggctatacactgcagggaaccgggactggaacaatgacagtggagagcccaggactcgtaaccatggatcatcatgctcgtcatgatatcaatgttggcacaacacaggcacacgtgcatacacttcctcaggattacaagctcctcccgcgttagaaccatatcccagggaacaacccattcctgaatcagcgtaaatcccacactgcagggaagacctcgcacgtaactcacgttgtgcattgtcaaagtgttacattcgggcagcagcggatgatcctccagtatggtagcgcgggtttctgtctcaaaaggaggtagacgatccctactgtacggagtgcgccgagacaaccgagatcgtgttggtcgtagtgtcatgccaaatggaacgccggacgtagtcatatttcctgaagcaaaaccaggtgcgggcgtgacaaacagatctgcgtctccggtctcgccgcttagatcgctctgtgtagtagttgtagtatatccactctctcaaagcatccaggcgccccctggcttcgggttctatgtaaactccttcatgcgccgctgccctgataacatccaccaccgcagaataagccacacccagccaacctacacattcgttctgcgagtcacacacgggaggagcgggaagagctggaagaaccatgtttttttttttattccaaaagattatccaaaacctcaaaatgaagatctattaagtgaacgcgctcccctccggtggcgtggtcaaactctacagccaaagaacagataatggcatttgtaagatgttgcacaatggcttccaaaaggcaaacggccctcacgtccaagtggacgtaaaggctaaacccttcagggtgaatctcctctataaacattccagcaccttcaaccatgcccaaataattctcatctcgccaccttctcaatatatctctaagcaaatcccgaatattaagtccggccattgtaaaaatctgctccagagcgccctccaccttcagcctcaagcagcgaatcatgattgcaaaaattcaggttcctcacagacctgtataagattcaaaagcggaacattaacaaaaataccgcgatcccgtaggtcccttcgcagggccagctgaacataatcgtgcaggtctgcacggaccagcgcggccacttccccgccaggaaccatgacaaaagaacccacactgattatgacacgcatactcggagctatgctaaccagcgtagccccgatgtaagcttgttgcatgggcggcgatataaaatgcaaggtgctgctcaaaaaatcaggcaaagcctcgcgcaaaaaagaaagcacatcgtagtcatgctcatgcagataaaggcaggtaagctccggaaccaccacagaaaaagacaccatttttctctcaaacatgtctgcgggtttctgcataaacacaaaataaaataacaaaaaaacatttaaacattagaagcctgtcttacaacaggaaaaacaacccttataagcataagacggactacggccatgccggcgtgaccgtaaaaaaactggtcaccgtgattaaaaagcaccaccgacagctcctcggtcatgtccggagtcataatgtaagactcggtaaacacatcaggttgattcacatcggtcagtgctaaaaagcgaccgaaatagcccgggggaatacatacccgcaggcgtagagacaacattacagcccccataggaggtataacaaaattaataggagagaaaaacacataaacacctgaaaaaccctcctgcctaggcaaaatagcaccctcccgctccagaacaacatacagcgcttccacagcggcagccatggtggcatttgcaaaagcctaggcctccaaaaaagcctcctcactacttctggaatagctcagaggccgaggcggcctcggcctctgcataaataaaaaaaattagtcagccatggggcggagaatgggcggaactgggcggagttaggggcgggatgggcggagttaggggcgggactatggttgctgactaattgagatgcatgctttgcatacttctgcctgctggggagcctggggactttccacacctggttgctgactaattgagatgcatgctttgcatacttctgcctgctggggagcctggggactttccacaccctaactgacacacacgttacgtcacttcccattttaagaaaactacaattcccaacacatacaagttactccgcccttaattaaatcggatccgatatctagatgtattcgcgaggtaccgagctcgaattctctggccgtcgttttacaacgtcgtgactgggaaaaccctggcgttacccaacttaatcgccttgcagcacatccccctttcgccagctggcgtaatagcgaagaggcccgcaccgatcgcccttcccaacagttgcgcagcctgaatggcgaatggcgcctgatgcggtattttctccttacgcatctgtgcggtatttcacaccgcatatggtgcactctcagtacaatctgctctgatgccgcatagttaagccagccccgacacccgccaacacccgctgacgcgccctgacgggcttgtctgctcccggcatccgcttacagacaagctgtgaccgtctccgggagctgcatgtgtcagaggttttcaccgtcatcaccgaaacgcgcga

SEQ ID NO: 65 - DNA, 13814 bp, Artificial Sequence
  Description of Artificial Sequence: Synthetic polynucleotide
tgcagctctggcccgtgtctcaaaatctctgatgttacattgcacaagataaaaatatatcatcatgaacaataaaactgtctgcttacataaacagtaatacaaggggtgttatgagccatattcaacgggaaacgtcgaggccgcgattaaattccaacatggatgctgatttatatgggtataaatgggctcgcgataatgtcgggcaatcaggtgcgacaatctatcgcttgtatgggaagcccgatgcgccagagttgtttctgaaacatggcaaaggtagcgttgccaatgatgttacagatgagatggtcagactaaactggctgacggaatttatgcctcttccgaccatcaagcattttatccgtactcctgatgatgcatggttactcaccactgcgatccccggaaaaacagcattccaggtattagaagaatatcctgattcaggtgaaaatattgttgatgcgctggcagtgttcctgcgccggttgcattcgattcctgtttgtaattgtccttttaacagcgatcgcgtatttcgtctcgctcaggcgcaatcacgaatgaataacggtttggttgatgcgagtgattttgatgacgagcgtaatggctggcctgttgaacaagtctggaaagaaatgcataaacttttgccattctcaccggattcagtcgtcactcatggtgatttctcacttgataaccttatttttgacgaggggaaattaataggttgtattgatgttggacgagtcggaatcgcagaccgataccaggatcttgccatcctatggaactgcctcggtgagttttctccttcattacagaaacggctttttcaaaaatatggtattgataatcctgatatgaataaattgcagtttcatttgatgctcgatgagtttttctaatcagaattggttaattggttgtaacattattcagattgggcttgatttaaaacttcatttttaatttaaaaggatctaggtgaagatcctttttgataatctcatgaccaaaatcccttaacgtgagttttcgttccactgagcgtcagaccccgtagaaaagatcaaaggatcttcttgagatcctttttttctgcgcgtaatctgctgcttgcaaacaaaaaaaccaccgctaccagcggtggtttgtttgccggatcaagagctaccaactctttttccgaaggtaactggcttcagcagagcgcagataccaaatactgttcttctagtgtagccgtagttaggccaccacttcaagaactctgtagcaccgcctacatacctcgctctgctaatcctgttaccagtggctgctgccagtggcgataagtcgtgtcttaccgggttggactcaagacgatagttaccggataaggcgcagcggtcgggctgaacggggggttcgtgcacacagcccagcttggagcgaacgacctacaccgaactgagatacctacagcgtgagctatgagaaagcgccacgcttcccgaagggagaaaggcggacaggtatccggtaagcggcagggtcggaacaggagagcgcacgagggagcttccagggggaaacgcctggtatctttatagtcctgtcgggtttcgccacctctgacttgagcgtcgatttttgtgatgctcgtcaggggggcggagcctatggaaaaacgccagcaacgcggcctttttacggttcctggccttttgctggccttttgctcacatgttctttcctgcgttatcccctgattctgtggataaccgtattaccgcctttgagtgagctgataccgctcgccgcagccgaacgaccgagcgcagcgagtcagtgagcgaggaagcggaagagcgcccaatacgcaaaccgcctctccccgcgcgttggccgattcattaatgcagctggcacgacaggtttcccgactggaaagcgggcagtgagcgcaacgcaattaatgtgagttagctcactcattaggcaccccaggctttacactttatgcttccggctcgtatgttgtgtggaattgtgagcggataacaatttcacacaggaaacagctatgaccatgattacaccaagcttgcatgcaggcctctgcagtcgaccagaagcaccatgtccttgggtccggcctgctgaatgcgcaggcggtcggccatgccccaggcttcgttttgacatcggcgcaggtctttgtagtagtcttgcatgagcctttctaccggcacttcttcttctccttcctcttgtcctgcatctcttgcatctatcgctgcggcggcggcggagtttggccgtaggtggcgccctcttcctcccatgcgtgtgaccccgaagcccctcatcggctgaagcagggctaggtcggcgacaacgcgctcggctaatatggcctgctgcacctgcgtgagggtagactggaagtcatccatgtccacaaagcggtggtatgcgcccgtgttgatggtgtaagtgcagttggccataacggaccagttaacggtctggtgacccggctgcgagagctcggtgtacctgagacgcgagtaagccctcgagtcaaatacgtagtcgttgcaagtccgcaccaggtactggtatcccaccaaaaagtgcggcggcggctggcggtagaggggccagcgtagggtggccggggctccgggggcgagatcttccaacataaggcgatgatatccgtagatgtacctggacatccaggtgatgccggcggcggtggtggaggcgcgcggaaagtcgcggacgcggttccagatgttgcgcagcggcaaaaagtgctccatggtcgggacgctctggccggtcaggcgcgcgcaatcgttgacgctctagcgtgcaaaaggagagcctgtaagcgggcactcttccgtggtctggtggataaattcgcaagggtatcatggcggacgaccggggttcgagccccgtatccggccgtccgccgtgatccatgcggttaccgcccgcgtgtcgaacccaggtgtgcgacgtcagacaacgggggagtgctccttttggcttccttccaggcgcggcggctgctgcgctagcttttttggccactggccgcgcgcagcgtaagcggttaggctggaaagcgaaagcattaagtggctcgctccctgtagccggagggttattttccaagggttgagtcgcgggacccccggttcgagtctcggaccgagactgggggcgtacactggatggcctttgcctggaacccgcactcaaaaacatgctacctctttgagccctttggcttttctgaccagcgactcaagcaggtttaccagtttgagtacgagtcactcctgcgccgtagcgccattgcttcttcccccgaccgctgtataacgctggaaaagtccacccaaagcgtacaggggcccaactcggccgcctgtggactattctgctgcatgtttctccacgcctttgccaactggccccaaactcccatggatcacaaccccaccatgaaccttattaccggggtacccaactccatgctcaacagtccccaggtacagcccaccctgcgtcgcaaccaggaacagctctacagcttcctggagcgccactcgccctacttccgcagccacagtgcgcagattaggagcgccacttctttttgtcacttgaaaaacatgtaaaaataatgtactagagacactttcaataaaggcaaatgcttttatttgtacactctcgggtgattatttacccccacccttgccgtctgcgccgtttaaaaatcaaaggggttctgccgcgcatcgctatgcgccactggcagggacacgttgcgatactggtgtttagtgctccacttaaactcaggcacaaccatccgcggcagctcggtgaagttttcactccacaggctgcgcaccatcaccaacgcgtttagcaggtcgggcgccgatatcttgaagtcgcagttggggcctccgccctgcgcgcgcgagttgcgatacacagggttgcagcactggaacactatcagcgccgggtggtgcacgctggccagcacgctcttgtcggagatcagatccgcgtccaggtcctccgcgttgctcagggcgaacggagtcaactttggtagctgccttcccaaaaagggcgcgtgcccaggctttgagttgcactcgcaccgtagtggcatcaaaaggtgaccgtgcccggtctgggcgttaggatacagcgcctgcataaaagccttgatctgcttaaaagccacctgagcctttgcgccttcagagaagaacatgccgcaagacttgccggaaaactgattggccggacaggccgcgtcgtgcacgcagcaccttgcgtcggtgttggagatctgcaccacatttcggccccaccggttcttcacgatcttggccttgctagactgctccttcagcgcgcgctgcccgttttcgctcgtcacatccatttcaatcacgtgctccttatttatcataatgcttccgtgtagacacttaagctcgccttcgatctcagcgcagcggtgcagccacaacgcgcagcccgtgggctcgtgatgcttgtaggtcacctctgcaaacgactgcaggtacgcctgcaggaatcgccccatcatcgtcacaaaggtcttgttgctggtgaaggtcagctgcaacccgcggtgctcctcgttcagccaggtcttgcatacggccgccagagcttccacttggtcaggcagtagtttgaagttcgcctttagatcgttatccacgtggtacttgtccatcagcgcgcgcgcagcctccatgcccttctcccacgcagacacgatcggcacactcagcgggttcatcaccgtaatttcactttccgcttcgctgggctcttcctcttcctcttgcgtccgcataccacgcgccactgggtcgtcttcattcagccgccgcactgtgcgcttacctcctttgccatgcttgattagcaccggtgggttgctgaaacccaccatttgtagcgccacatcttctctttcttcctcgctgtccacgattacctctggtgatggcgggcgctcgggcttgggagaagggcgcttctttttcttcttgggcgcaatggccaaatccgccgccgaggtcgatggccgcgggctgggtgtgcgcggcaccagcgcgtcttgtgatgagtcttcctcgtcctcggactcgatacgccgcctcatccgcttttttgggggcgcccggggaggcggcggcgacggggacggggacgacacgtcctccatggttgggggacgtcgcgccgcaccgcgtccgcgctcgggggtggtttcgcgctgctcctcttcccgactggccatttccttctcctataggcagaaaaagatccacaaaagcgaagatcagcttcggcgcacgctggaagacgcggaggctctcttcagtaaatactgcgcgctgactcttaaggactagtttcgcgccctttctcaaatttaagcgcgaaaactacgtcatctccagcggccacacccggcgccagcacctgttgtcagcgccattggcgcgcccgcccgccgcgcgcttcgctttttatagggccgccgccgccgccgcctcgccataaaaggaaactttcggagcgcgccgctctgattggctgccgccgcacctctccgcctcgccccgccccgcccctcgccccgccccgccccgcctggcgcgcgccccccccccccccccgcccccatcgctgcacaaaataattaaaaaataaataaatacaaaattgggggtggggaggggggggagatggggagagtgaagcagaacgtggggctcacctcgaggccggccgaatatcttcatttaaataaatgagtcttcggacctcgcgggggccgcttaagcggtggttagggtttgtctgacgcggggggagggggaaggaacgaaacactctcattcggaggcggctcggggtttggtcttggtggccacgggcacgcagaagagcgccgcgatcctcttaagcacccccccgccctccgtggaggcgggggtttggtcggcgggtggtaactggcgggccgctgactcgggcgggtcgcgcgccccagagtgtgaccttttcggtctgctcgcagacccccgggcggcgccgccgcggcggcgacgggctcgctgggtcctaggctccatggggaccgtatacgtggacaggctctggagcatccgcacgactgcggtgatattaccggagaccttctgcgggacgagccgggtcacgcggctgacgcggagcgtccgttgggcgacaaacaccaggacggggcacaggtacactatcttgtcacccggaggcgcgagggactgcaggagcttcagggagtggcgcagctgcttcatccccgtggcccgttgctcgcgtttgctggcggtgtccccggaagaaatatatttgcatgtctttagttctatgatgacacaaaccccgcccagcgtcttgtcattggcgaattcgaacacgcagatgcagtcggggcggcgcggtcccaggtccacttcgcatattaaggtgacgcgtgtggcctcgaacaccgagcgaccctgcagcgacccgcttaagccaccatggagacaaagcccaagacggcaaccaccatcaaggtcccccccgggcccctgggatacgtgtacgctcgcgcgtgtccgtccgaaggcatcgagcttctggcgttactgtcggcacgcagcggcgattccgacgtcgccgtggcgcccctggtcgtgggcctgaccgtggagagcggctttgaggccaacgtggccgtggtcgtgggttctcgcacgacggggctcgggggtaccgcggtgtccctgaaactgacgccctcgcactacagctcgtccgtgtacgtctttcacggcggccggcacctggaccccagcacccaggccccgaacctgacgcgactttgcgagcgggcacgccgccattttggcttttcggactacaccccccggcccggcgacctcaaacacgagacgacgggggaggcgctgtgtgagcgcctcggcctggacccggaccgcgccctcctgtatctggtcgttaccgagggcttcaaggaggccgtgtgcatcaacaacacctttctgcacctgggaggctcggacaaggtaaccataggcggggcggaggtgcaccgcatacccgtgtacccgttgcagctgttcatgccggattttagccgtgtcatcgcagagccgttcaacgccaaccaccgatcgatcggggagaattttacctacccgcttccgttttttaaccgccccctcaaccgcctcctgttcgaggcggtcgtgggacccgccgccgtggcactgcgatgccgaaacgtggacgccgtggcccgcgccgccgcccacctggcgtttgacgaaaaccacgagggcgccgccctccccgccgacattacgttcacggccttcgaagccagccagggtaagaccccgcggggcgggcgcgacggcggcggcaagggcccggcgggcgggttcgaacagcgcctggcctccgtcatggccggagacgccgccctggccctcgagtctatcgtgtcgatggccgtctttgacgagccgcccaccgacatctccgcgtggccgctgttcgagggccaggacacggccgcggcccgcgccaacgccgtcggggcgtacctggcgcgcgccgcgggactcgtgggggccatggtatttagcaccaactcggccctccatctcaccgaggtggacgacgccggcccggcggacccaaaggaccacagcaaaccctccttttaccgcttcttcctcgtgcccgggacccacgtggcggccaacccacaggtggaccgcgagggacacgtggtgcccgggttcgagggtcggcccaccgcgcccctcgtcggcggaacccaggaatttgccggcgagcacctggccatgctgtgtgggttttccccggcgctgctggccaagatgctgttttacctggagcgctgcgacggcggcgtgatcgtcgggcgccaggagatggacgtgtttcgatacgtcgcggactccaaccagaccgacgtgccctgtaacctatgcaccttcgacacgcgccacgcctgcgtacacacgacgctcatgcgcctccgggcgcgccatccaaagttcgccagcgccgcccgcggagccatcggcgtcttcgggaccatgaacagcatgtatagcgactgcgacgtgctgggaaactacgccgccttctcggccctgaagcgcgcggacggatccgagaccgcccggaccatcatgcaggagacgtaccgcgcggcgaccgagcgcgtcatggccgaactcgagaccctgcagtacgtggaccaggcggtccccacggccatggggcggctggagaccatcatcaccaaccgcgaggccctgcatacggtggtgaacaacgtcaggcaggtcgtggaccgcgaggtggagcagctgatgcgcaacctggtggaggggaggaacttcaagtttcgcgacggtctgggcgaggccaaccacgccatgtccctgacgctggacccgtacgcgtgcgggccgtgccccctgcttcagcttctcgggcggcgatccaacctcgccgtgtaccaggacctggccctgagtcagtgccacggggtgttcgccgggcagtcggtcgaggggcgcaactttcgcaatcaattccaaccggtgctgcggcggcgcgtgatggacatgtttaacaacgggtttctgtcggccaaaacgctgacggtcgcgctctcggagggggcggctatctgcgcccccagcctaacggcgggccagacggcccccgccgagagcagcttcgagggcgacgttgcccgcgtgaccctggggtttcccaaggagctgcgcgtcaagagccgcgtgttgttcgcgggcgcgagcgccaacgcgtccgaggccgccaaggcgcgggtcgccagcctccagagcgcctaccagaagcccgacaagcgcgtggacatcctcctcggaccgctgggctttctgctcaagcagttccacgcggccatcttccccaacggcaagcccccggggtccaaccagccgaacccgcagtggttctggacggccctccaacgcaaccagcttcccgcccggctcctgtcgcgcgaggacatcgagaccatcgcgttcattaaaaagttttccctggactacggcgcgataaactttattaacctggcccccaacaacgtgagcgagctggcgatgtactacatggcaaaccagattctgcggtactgcgatcactcgacatacttcatcaacacccttacggccatcatcgcggggtcccgccgtccccccagcgtgcaggctgccgccgcgtggtccgcgcagggcggggcgggcctggaggccggggcccgcgcgctgatggacgccgtggacgcgcatccgggcgcgtggacgtccatgttcgccagctgcaacctgctgcggcccgtcatggcggcgcgccccatggtcgtgttggggttgagcatcagcaagtactacggcatggccggcaacgaccgtgtgtttcaggccgggaactgggccagcctgatgggcggcaaaaacgcgtgcccgctccttatttttgaccgcacccgcaagttcgtcctggcctgtccccgggccgggtttgtgtgcgcggcctcaagcctcggcggcggagcgcacgaaagctcgctgtgcgagcagctccggggcattatctccgagggcggggcggccgtcgccagtagcgtgttcgtggcgaccgtgaaaagcctggggccccgcacccagcagctgcagatcgaggactggctggcgctcctggaggacgagtacctaagcgaggagatgatggagctgaccgcgcgtgccctggagcgcggcaacggcgagtggtcgacggacgcggccctggaggtggcgcacgaggccgaggccctagtcagccaactcggcaacgccggggaggtgtttaactttggggattttggctgcgaggacgacaacgcgacgccgttcggcggcccgggggccccgggaccggcatttgccggccgcaaacgggcgttccacggggatgacccgtttggggaggggccccccgacaaaaagggagacctgacgttggatatgctgtagtaacggcaataaaaagacagaataaaacgcacggtgttgggtcgtttgttcgtttaaacatcgatgcggccgccgtttgtgttatgtttcaacgtgtttatttttcaattgcagaaaatttcaagtcatttttcattcagtagtatagccccaccaccacatagcttatacagatcaccgtaccttaatcaaactcacagaaccctagtattcaacctgccacctccctcccaacacacagagtacacagtcctttctccccggctggccttaaaaagcatcatatcatgggtaacagacatattcttaggtgttatattccacacggtttcctgtcgagccaaacgctcatcagtgatattaataaactccccgggcagctcacttaagttcatgtcgctgtccagctgctgagccacaggctgctgtccaacttgcggttgcttaacgggcggcgaaggagaagtccacgcctacatgggggtagagtcataatcgtgcatcaggatagggcggtggtgctgcagcagcgcgcgaataaactgctgccgccgccgctccgtcctgcaggaatacaacatggcagtggtctcctcagcgatgattcgcaccgcccgcagcataaggcgccttgtcctccgggcacagcagcgcaccctgatctcacttaaatcagcacagtaactgcagcacagcaccacaatattgttcaaaatcccacagtgcaaggcgctgtatccaaagctcatggcggggaccacagaacccacgtggccatcataccacaagcgcaggtagattaagtggcgacccctcataaacacgctggacataaacattacctcttttggcatgttgtaattcaccacctcccggtaccatataaacctctgattaaacatggcgccatccaccaccatcctaaaccagctggccaaaacctgcccgccggctatacactgcagggaaccgggactggaacaatgacagtggagagcccaggactcgtaaccatggatcatcatgctcgtcatgatatcaatgttggcacaacacaggcacacgtgcatacacttcctcaggattacaagctcctcccgcgttagaaccatatcccagggaacaacccattcctgaatcagcgtaaatcccacactgcagggaagacctcgcacgtaactcacgttgtgcattgtcaaagtgttacattcgggcagcagcggatgatcctccagtatggtagcgcgggtttctgtctcaaaaggaggtagacgatccctactgtacggagtgcgccgagacaaccgagatcgtgttggtcgtagtgtcatgccaaatggaacgccggacgtagtcatatttcctgaagcaaaaccaggtgcgggcgtgacaaacagatctgcgtctccggtctcgccgcttagatcgctctgtgtagtagttgtagtatatccactctctcaaagcatccaggcgccccctggcttcgggttctatgtaaactccttcatgcgccgctgccctgataacatccaccaccgcagaataagccacacccagccaacctacacattcgttctgcgagtcacacacgggaggagcgggaagagctggaagaaccatgtttttttttttattccaaaagattatccaaaacctcaaaatgaagatctattaagtgaacgcgctcccctccggtggcgtggtcaaactctacagccaaagaacagataatggcatttgtaagatgttgcacaatggcttccaaaaggcaaacggccctcacgtccaagtggacgtaaaggctaaacccttcagggtgaatctcctctataaacattccagcaccttcaaccatgcccaaataattctcatctcgccaccttctcaatatatctctaagcaaatcccgaatattaagtccggccattgtaaaaatctgctccagagcgccctccaccttcagcctcaagcagcgaatcatgattgcaaaaattcaggttcctcacagacctgtataagattcaaaagcggaacattaacaaaaataccgcgatcccgtaggtcccttcgcagggccagctgaacataatcgtgcaggtctgcacggaccagcgcggccacttccccgccaggaaccatgacaaaagaacccacactgattatgacacgcatactcggagctatgctaaccagcgtagccccgatgtaagcttgttgcatgggcggcgatataaaatgcaaggtgctgctcaaaaaatcaggcaaagcctcgcgcaaaaaagaaagcacatcgtagtcatgctcatgcagataaaggcaggtaagctccggaaccaccacagaaaaagacaccatttttctctcaaacatgtctgcgggtttctgcataaacacaaaataaaataacaaaaaaacatttaaacattagaagcctgtcttacaacaggaaaaacaacccttataagcataagacggactacggccatgccggcgtgaccgtaaaaaaactggtcaccgtgattaaaaagcaccaccgacagctcctcggtcatgtccggagtcataatgtaagactcggtaaacacatcaggttgattcacatcggtcagtgctaaaaagcgaccgaaatagcccgggggaatacatacccgcaggcgtagagacaacattacagcccccataggaggtataacaaaattaataggagagaaaaacacataaacacctgaaaaaccctcctgcctaggcaaaatagcaccctcccgctccagaacaacatacagcgcttccacagcggcagccataacagtcagccttaccagtaaaaaagaaaacctattaaaaaaacaccactcgacacggcaccagctcaatcagtcacagtgtaaaaaagggccaagtgcagagcgagtatatataggactaaaaaatgacgtaacggttaaagtccacaaaaaacacccagaaaaccgcacgcgaacctacgcccagaaacgaaagccaaaaaacccacaacttcctcaaatcgtcacttccgttttcccacgttacgtcacttcccattttaagaaaactacaattcccaacacatacaagttactccgcccttaattaaatcggatccgatatctagatgtattcgcgaggtaccgagctcgaattctctggccgtcgttttacaacgtcgtgactgggaaaaccctggcgttacccaacttaatcgccttgcagcacatccccctttcgccagctggcgtaatagcgaagaggcccgcaccgatcgcccttcccaacagttgcgcagcctgaatggcgaatggcgcctgatgcggtattttctccttacgcatctgtgcggtatttcacaccgcatatggtgcactctcagtacaatctgctctgatgccgcatagttaagccagccccgacacccgccaacacccgctgacgcgccctgacgggcttgtctgctcccggcatccgcttacagacaagctgtgaccgtctccgggagctgcatgtgtcagaggttttcaccgtcatcaccgaaacgcgcga

SEQ ID NO: 66 - DNA, 6883 bp, Artificial Sequence
  Description of Artificial Sequence: Synthetic polynucleotide
tgcagctctggcccgtgtctcaaaatctctgatgttacattgcacaagataaaaatatatcatcatgaacaataaaactgtctgcttacataaacagtaatacaaggggtgttatgagccatattcaacgggaaacgtcgaggccgcgattaaattccaacatggatgctgatttatatgggtataaatgggctcgcgataatgtcgggcaatcaggtgcgacaatctatcgcttgtatgggaagcccgatgcgccagagttgtttctgaaacatggcaaaggtagcgttgccaatgatgttacagatgagatggtcagactaaactggctgacggaatttatgcctcttccgaccatcaagcattttatccgtactcctgatgatgcatggttactcaccactgcgatccccggaaaaacagcattccaggtattagaagaatatcctgattcaggtgaaaatattgttgatgcgctggcagtgttcctgcgccggttgcattcgattcctgtttgtaattgtccttttaacagcgatcgcgtatttcgtctcgctcaggcgcaatcacgaatgaataacggtttggttgatgcgagtgattttgatgacgagcgtaatggctggcctgttgaacaagtctggaaagaaatgcataaacttttgccattctcaccggattcagtcgtcactcatggtgatttctcacttgataaccttatttttgacgaggggaaattaataggttgtattgatgttggacgagtcggaatcgcagaccgataccaggatcttgccatcctatggaactgcctcggtgagttttctccttcattacagaaacggctttttcaaaaatatggtattgataatcctgatatgaataaattgcagtttcatttgatgctcgatgagtttttctaatcagaattggttaattggttgtaacattattcagattgggcttgatttaaaacttcatttttaatttaaaaggatctaggtgaagatcctttttgataatctcatgaccaaaatcccttaacgtgagttttcgttccactgagcgtcagaccccgtagaaaagatcaaaggatcttcttgagatcctttttttctgcgcgtaatctgctgcttgcaaacaaaaaaaccaccgctaccagcggtggtttgtttgccggatcaagagctaccaactctttttccgaaggtaactggcttcagcagagcgcagataccaaatactgttcttctagtgtagccgtagttaggccaccacttcaagaactctgtagcaccgcctacatacctcgctctgctaatcctgttaccagtggctgctgccagtggcgataagtcgtgtcttaccgggttggactcaagacgatagttaccggataaggcgcagcggtcgggctgaacggggggttcgtgcacacagcccagcttggagcgaacgacctacaccgaactgagatacctacagcgtgagctatgagaaagcgccacgcttcccgaagggagaaaggcggacaggtatccggtaagcggcagggtcggaacaggagagcgcacgagggagcttccagggggaaacgcctggtatctttatagtcctgtcgggtttcgccacctctgacttgagcgtcgatttttgtgatgctcgtcaggggggcggagcctatggaaaaacgccagcaacgcggcctttttacggttcctggccttttgctggccttttgctcacatgttctttcctgcgttatcccctgattctgtggataaccgtattaccgcctttgagtgagctgataccgctcgccgcagccgaacgaccgagcgcagcgagtcagtgagcgaggaagcggaagagcgcccaatacgcaaaccgcctctccccgcgcgttggccgattcattaatgcagctggcacgacaggtttcccgactggaaagcgggcagtgagcgcaacgcaattaatgtgagttagctcactcattaggcaccccaggctttacactttatgcttccggctcgtatgttgtgtggaattgtgagcggataacaatttcacacaggaaacagctatgaccatgattacaccaagcttgcatgctacgtaatccgtagatgtacctggacatccaggtgatgccggcggcggtggtggaggcgcgcggaaagtcgcggacgcggttccagatgttgcgcagcggcaaaaagtgctccatggtcgggacgctctggccggtgaggcgtgcgcagtcgttgacgctctagaccgtgcaaaaggagagcctgtaagcgggcactcttccgtggtctggtggataaattcgcaagggtatcatggcggacgaccggggttcgaaccccggatccggccgtccgccgtgatccatgcggttaccgcccgcgtgtcgaacccaggtgtgcgacgtcagacaacgggggagcgctccttttggcttccttccaggcgcggcggctgctgcgctagcttttttggccactggccgcgcgcggcgtaagcggttaggctggaaagcgaaagcattaagtggctcgctccctgtagccggagggttattttccaagggttgagtcgcaggacccccggttcgagtctcgggccggccggactgcggcgaacgggggtttgcctccccgtcatgcaagaccccgcttgcaaattcctccggaaacagggacgagccccttttttgcttttcccagatgcatccggtgctgcggcagatgcgcccccctcctcagcagcggcaagagcaagagcagcggcagacatgcagggcaccctccccttctcctaccgcgtcaggaggggcaacatcgatccagacatgataagatacattgatgagtttggacaaaccacaactagaatgcagtgaaaaaaatgctttatttgtgaaatttgtgatgctattgctttatttgtaaccattataagctgcaataaacaagtttgtacactctcgggtgattatttacccccacccttgccgtctgcgccgtttaaaaatcaaaggggttctgccgcgcatcgctatgcgccactggcagggacacgttgcgatactggtgtttagtgctccacttaaactcaggcacaaccatccgcggcagctcggtgaagttttcactccacaggctgcgcaccatcaccaacgcgtttagcaggtcgggcgccgatatcttgaagtcgcagttggggcctccgccctgcgcgcgcgagttgcgatacacagggttgcagcactggaacactatcagcgccgggtggtgcacgctggccagcacgctcttgtcggagatcagatccgcgtccaggtcctccgcgttgctcagggcgaacggagtcaactttggtagctgccttcccaaaaagggcgcgtgcccaggctttgagttgcactcgcaccgtagtggcatcaaaaggtgaccgtgcccggtctgggcgttaggatacagcgcctgcataaaagccttgatctgcttaaaagccacctgagcctttgcgccttcagagaagaacatgccgcaagacttgccggaaaactgattggccggacaggccgcgtcgtgcacgcagcaccttgcgtcggtgttggagatctgcaccacatttcggccccaccggttcttcacgatcttggccttgctagactgctccttcagcgcgcgctgcccgttttcgctcgtcacatccatttcaatcacgtgctccttatttatcataatgcttccgtgtagacacttaagctcgccttcgatctcagcgcagcggtgcagccacaacgcgcagcccgtgggctcgtgatgcttgtaggtcacctctgcaaacgactgcaggtacgcctgcaggaatcgccccatcatcgtcacaaaggtcttgttgctggtgaaggtcagctgcaacccgcggtgctcctcgttcagccaggtcttgcatacggccgccagagcttccacttggtcaggcagtagtttgaagttcgcctttagatcgttatccacgtggtacttgtccatcagcgcgcgcgcagcctccatgcccttctcccacgcagacacgatcggcacactcagcgggttcatcaccgtaatttcactttccgcttcgctgggctcttcctcttcctcttgcgtccgcataccacgcgccactgggtcgtcttcattcagccgccgcactgtgcgcttacctcctttgccatgcttgattagcaccggtgggttgctgaaacccaccatttgtagcgccacatcttctctttcttcctcgctgtccacgattacctctggtgatggcgggcgctcgggcttgggagaagggcgcttctttttcttcttgggcgcaatggccaaatccgccgccgaggtcgatggccgcgggctgggtgtgcgcggcaccagcgcgtcttgtgatgagtcttcctcgtcctcggactcgatacgccgcctcatccgcttttttgggggcgcccggggaggcggcggcgacggggacggggacgacacgtcctccatggttgggggacgtcgcgccgcaccgcgtccgcgctcgggggtggtttcgcgctgctcctcttcccgactggccatggtggcttccttctcctataggcagggcgcgcccgcccgccgcgcgcttcgctttttatagggccgccgccgccgccgcctcgccataaaaggaaactttcggagcgcgccgctctgattggctgccgccgcacctctccgcctcgccccgccccgcccctcgccccgccccgccccgcctggcgcgcgccccccccccccccccgcccccatcgctgcacaaaataattaaaaaataaataaatacaaaattgggggtggggaggggggggagatggggagagtgaagcagaacgtggggctcacctcgaggccggccgaatatcttcatttaaatgtttaaacatcgatgcggccgcaacttgtttattgcagcttataatggttacaaataaagcaatagcatcacaaatttcacaaataaagcatttttttcactgcattctagttgtggtttgtccaaactcatcaatgtatcttagcttaacgggcggcgaaggagaagtccacgcctacatgggggtagagtcataatcgtgcatcaggatagggcggtggtgctgcagcagcgcgcgaataaactgctgccgccgccgctccgtcctgcaggaatacaacatggcagtggtctcctcagcgatgattcgcaccgcccgcagcataaggcgccttgtcctccgggcacagcagcgcaccctgatctcacttaaatcagcacagtaactgcagcacagcaccacaatattgttcaaaatcccacagtgcaaggcgctgtatccaaagctcatggcggggaccacagaacccacgtggccatcataccacaagcgcaggtagattaagtggcgacccctcataaacacgctggacataaacattacctcttttggcatgttgtaattcaccacctcccggtaccatataaacctctgattaaacatggcgccatccaccaccatcctaaaccagctggccaaaacctgcccgccggctatacactgcagggaaccgggactggaacaatgacagtggagagcccaggactcgtaaccatggatcatcatgctcgtcatgatatcaatgttggcacaacacaggcacacgtgcatacacttcctcaggattacaagctcctcccgcgttagaaccatatcccagggaacaacccattcctgaatcagcgtaaatcccacactgcagggaagacctcgcacgtaactcacgttgtgcattgtcaaagtgttacattcgggcagcagcggatgatcctccagtatggtagcgcgggtttctgtctcaaaaggaggtagacgatccctactgtacggagtgcgccgagacaaccgagatcgtgttggtcgtagtgtcatgccaaatggaacgccggacgtagtcatatttcctgaagcaaaaccaggtgcgggcgtgacaaacagatctgcgtctccggtctcgccgcttagatcgctctgtgtagtagttgtagtatatccactctctcaaagcatccaggcgccccctggcttcgggttctatgtaaactccttcatgcgccgctgccctgataacatccaccaccgcagaataagccacacccagccaacctacacattcgttctgcgagtcacacacgggaggagcgggaagagctggaagaaccatggtggcatttgcaaaagcctaggcctccaaaaaagcctcctcactacttctggaatagctcagaggccgaggcggcctcggcctctgcataaataaaaaaaattagtcagccatggggcggagaatgggcggaactgggcggagttaggggcgggatgggcggagttaggggcgggactatggttgctgactaattgagatgcatgctttgcatacttctgcctgctggggagcctggggactttccacacctggttgctgactaattgagatgcatgctttgcatacttctgcctgctggggagcctggggactttccacaccctaactgacacacacgttacgtcacttcccattttaagaaaactacaattcccaacacatacaagttactccgcccttaattaacatatggtgcactctcagtacaatctgctctgatgccgcatagttaagccagccccgacacccgccaacacccgctgacgcgccctgacgggcttgtctgctcccggcatccgcttacagacaagctgtgaccgtctccgggagctgcatgtgtcagaggttttcaccgtcatcaccgaaacgcgcga

SEQ ID NO: 67 - DNA, 122 bp, Artificial Sequence
  Description of Artificial Sequence: Synthetic polynucleotide
aacttgtttattgcagcttataatggttacaaataaagcaatagcatcacaaatttcacaaataaagcatttttttcactgcattctagttgtggtttgtccaaactcatcaatgtatctta

SEQ ID NO: 68 - DNA, 330 bp, Artificial Sequence
  Description of Artificial Sequence: Synthetic polynucleotide
gtgtgtcagttagggtgtggaaagtccccaggctccccagcaggcagaagtatgcaaagcatgcatctcaattagtcagcaaccaggtgtggaaagtccccaggctccccagcaggcagaagtatgcaaagcatgcatctcaattagtcagcaaccatagtcccgcccctaactccgcccatcccgcccctaactccgcccagttccgcccattctccgccccatggctgactaattttttttatttatgcagaggccgaggccgcctcggcctctgagctattccagaagtagtgaggaggcttttttggaggcctaggcttttgcaaa

SEQ ID NO: 69 - DNA, 225 bp, Artificial Sequence
  Description of Artificial Sequence: Synthetic polynucleotide
ctgtgccttctagttgccagccatctgttgtttgcccctcccccgtgccttccttgaccctggaaggtgccactcccactgtcctttcctaataaaatgaggaaattgcatcgcattgtctgagtaggtgtcattctattctggggggtggggtggggcaggacagcaagggggaggattgggaagacaatagcaggcatgctggggatgcggtgggctctatgg

SEQ ID NO: 70 - DNA, 387 bp, Artificial Sequence
  Description of Artificial Sequence: Synthetic polynucleotide
taccgacggcgacaccttcgcgacatacaacaagacctcgccctcccacgataaaacggatccgtcctcccaaaaagtccacaaatacacaaaaagagaggataattaaaacaatatggaggatacccccgacattacaacagagatgcggacgcccatacataagggggcccgataaagccagcgaaaaatcgtgactggctacacttagttggactacacaaatggctcagaatgtaatactgaggcctgtactggctcctcgacagccaccacgaaaaattagtgccactggtcaaaaaaatgccagtgcggccgtaccggcatcaggcagaatacgaatattcccaacaaaaaggacaacattctgtccgaagattacaaatt

SEQ ID NO: 71 - protein, 128 aa, Artificial Sequence
  Description of Artificial Sequence: Synthetic polypeptide
MAAAVEALYVVLEREGAILPRQEGFSGVYVFFSPINFVIPPMGAVMLSLRLRVCIPPGYFGRFLALTDVNQPDVFTESYIMTPDMTEELSVVLFNHGDQFFYGHAGMAVVRLMLIRVVFPVVRQASNV

SEQ ID NO: 72 - DNA, 411 bp, Artificial Sequence
  Description of Artificial Sequence: Synthetic polynucleotide
tacgtctttgggcgtctgtacaaactctctttttaccacagaaaaagacaccaccaaggcctcgaatggacggaaatagacgtactcgtactgatgctacacgaaagaaaaaacgcgctccgaaacggactaaaaaactcgtcgtggaacgtaaaatatagcggcgggtacgttgttcgaatgtagccccgatgcgaccaatcgtatcgaggctcatacgcacagtattagtcacacccaagaaaacagtaccaaggaccgccccttcaccggcgcgaccaggcacgtctggacgtgctaatacaagtcgaccgggacgcttccctggatgccctagcgccataaaaacaattacaaggcgaaaacttagaatatgtccagacactccttggacttaaaaacgttagtact

SEQ ID NO: 73 - protein, 136 aa, Artificial Sequence
  Description of Artificial Sequence: Synthetic polypeptide
MQKPADMFERKMVSFSVVVPELTCLYLHEHDYDVLSFLREALPDFLSSTLHFISPPMQQAYIGATLVSIAPSMRVIISVGSFVMVPGGEVAALVRADLHDYVQLALRRDLRDRGIFVNVPLLNLIQVCEEPEFLQS

SEQ ID NO: 74 - DNA, 351 bp, Artificial Sequence
  Description of Artificial Sequence: Synthetic polynucleotide
tactaagcgacgaactccgacttccacctcccgcgagacctcgtctaaaaatgttaccggcctgaattataagccctaaacgaatctctatataactcttccaccgctctactcttaataaacccgtaccaacttccacgaccttacaaatatctcctctaagtgggacttcccaaatcggaaatgcaggtgaacctgcactcccggcaaacggaaaaccttcggtaacacgttgtagaatgtttacggtaatagacaagaaaccgacatctcaaactggtgcggtggcctcccctcgcgcaagtgaattatctagaagtaaaactccaaaacctattagaaaaccttatt

SEQ ID NO: 75 - protein, 116 aa, Artificial Sequence
  Description of Artificial Sequence: Synthetic polypeptide
MIRCLRLKVEGALEQIFTMAGLNIRDLLRDILRRWRDENYLGMVEGAGMFIEEIHPEGFSLYVHLDVRAVCLLEAIVQHLTNAIICSLAVEFDHATGGERVHLIDLHFEVLDNLLE

SEQ ID NO: 76 - DNA, 345 bp, Artificial Sequence
  Description of Artificial Sequence: Synthetic polynucleotide
taccaagaaggtcgagaagggcgaggagggcacacactgagcgtcttgcttacacatccaaccgacccacaccgaataagacgccaccacctacaatagtcccgtcgccgcgtacttcctcaaatgtatcttgggcttcggtcccccgcggacctacgaaactctctcacctatatgatgttgatgatgtgtctcgctagattcgccgctctggcctctgcgtctagacaaacagtgcgggcgtggaccaaaacgaagtcctttatactgatgcaggccgcaaggtaaaccgtactgtgatgctggttgtgctagagccaacagagccgcgtgaggcatgtcatc

SEQ ID NO: 77 - protein, 114 aa, Artificial Sequence
  Description of Artificial Sequence: Synthetic polypeptide
MVLPALPAPPVCDSQNECVGWLGVAYSAVVDVIRAAAHEGVYIEPEARGRLDALREWIYYNYYTERSKRRDRRRRSVCHARTWFCFRKYDYVRRSIWHDTTTNTISVVSAHSVQ

SEQ ID NO: 78 - DNA, 885 bp, Artificial Sequence
  Description of Artificial Sequence: Synthetic polynucleotide
tactgatgcaggccgcaaggtaaaccgtactgtgatgctggttgtgctagagccaacagagccgcgtgaggcatgtcatccctagcagatggaggaaaactctgtctttgggcgcgatggtatgacctcctagtaggcgacgacgggcttacattgtgaaactgttacgtgttgcactcaatgcacgctccagaagggacgtcacaccctaaatgcgactaagtccttacccaacaagggaccctataccaagattgcgccctcctcgaacattaggactccttcacatacgtgcacacggacacaacacggttgtaactatagtactgctcgtactactaggtaccaatgctcaggacccgagaggtgacagtaacaaggtcagggccaagggacgtcacatatcggccgcccgtccaaaaccggtcgaccaaatcctaccaccacctaccgcggtacaaattagtctccaaatataccatggccctccaccacttaatgttgtacggttttctccattacaaatacaggtcgcacaaatactccccagcggtgaattagatggacgcgaacaccatactaccggtgcacccaagacaccaggggcggtactcgaaacctatgtcgcggaacgtgacaccctaaaacttgttataacaccacgacacgacgtcaatgacacgactaaattcactctagtcccacgcgacgacacgggcctcctgttccgcggaatacgacgcccgccacgcttagtagcgactcctctggtgacggtacaacataaggacgtcctgcctcgccgccgccgtcgtcaaataagcgcgcgacgacgtcgtggtggcgggataggactacgtgctaatactgagatgggggtacatc

SEQ ID NO: 79 - protein, 294 aa, Artificial Sequence
  Description of Artificial Sequence: Synthetic polypeptide
MTTSGVPFGMTLRPTRSRLSRRTPYSRDRLPPFETETRATILEDHPLLPECNTLTMHNVSYVRGLPCSVGFTLIQEWVVPWDMVLTREELVILRKCMHVCLCCANIDIMTSMMIHGYESWALHCHCSSPGSLQCIAGGQVLASWFRMVVDGAMFNQRFIWYREVVNYNMPKEVMFMSSVFMRGRHLIYLRLWYDGHVGSVVPAMSFGYSALHCGILNNIVVLCCSYCADLSEIRVRCCARRTRRLMLRAVRIIAEETTAMLYSCRTERRRQQFIRALLQHHRPILMHDYDSTPM

SEQ ID NO: 80 - DNA, 1164 bp, Artificial Sequence
  Description of Artificial Sequence: Synthetic polynucleotide
atgactacgtccggcgttccatttggcatgacactacgaccaacacgatctcggttgtctcggcgcactccgtacagtagggatcgtctacctccttttgagacagaaacccgcgctaccatactggaggatcatccgctgctgcccgaatgtaacactttgacaatgcacaacgtgagttacgtgcgaggtcttccctgcagtgtgggatttacgctgattcaggaatgggttgttccctgggatatggttctaacgcgggaggagcttgtaatcctgaggaagtgtatgcacgtgtgcctgtgttgtgccaacattgatatcatgacgagcatgatgatccatggttacgagtcctgggctctccactgtcattgttccagtcccggttccctgcagtgtatagccggcgggcaggttttggccagctggtttaggatggtggtggatggcgccatgtttaatcagaggtttatatggtaccgggaggtggtgaattacaacatgccaaaagaggtaatgtttatgtccagcgtgtttatgaggggtcgccacttaatctacctgcgcttgtggtatgatggccacgtgggttctgtggtccccgccatgagctttggatacagcgccttgcactgtgggattttgaacaatattgtggtgctgtgctgcagttactgtgctgatttaagtgagatcagggtgcgctgctgtgcccggaggacaaggcgccttatgctgcgggcggtgcgaatcatcgctgaggagaccactgccatgttgtattcctgcaggacggagcggcggcggcagcagtttattcgcgcgctgctgcagcaccaccgccctatcctgatgcacgattatgactctacccccatgtaggcgtggacttctccttcgccgcccgttaagcaaccgcaagttggacagcagcctgtggctcagcagctggacagcgacatgaacttaagtgagctgcccggggagtttattaatatcactgatgagcgtttggctcgacaggaaaccgtgtggaatataacacctaagaatatgtctgttacccatgatatgatgctttttaaggccagccggggagaaaggactgtgtactctgtgtgttgggagggaggtggcaggttgaatactagggttctgtga

SEQ ID NO: 81 - protein, 150 aa, Artificial Sequence
  Description of Artificial Sequence: Synthetic polypeptide
MTTSGVPFGMTLRPTRSRLSRRTPYSRDRLPPFETETRATILEDHPLLPECNTLTMHNAWTSPSPPVKQPQVGQQPVAQQLDSDMNLSELPGEFINITDERLARQETVWNITPKNMSVTHDMMLFKASRGERTVYSVCWEGGGRLNTRVL

SEQ ID NO: 82 - DNA, 239 bp, Artificial Sequence
  Description of Artificial Sequence: Synthetic polynucleotide
gggaaaacggaagtgacgatttgaggaagttgtgggttttttggctttcgtttctgggcgtaggttcgcgtgcggttttctgggtgttttttgtggactttaaccgttacgtcattttttagtcctatatatactcgctctgcacttggcccttttttacactgtgactgattgagctggtgccgtgtcgagtggtgtttttttaataggttttcttttttactggtaaggctgactgt

SEQ ID NO: 83 - DNA, 330 bp, Artificial Sequence; identical to SEQ ID NO: 68
  Description of Artificial Sequence: Synthetic polynucleotide

SEQ ID NO: 84 - DNA, 36 bp, Artificial Sequence
  Description of Artificial Sequence: Synthetic oligonucleotide
taagagtcagcgcgcagtatttactgaagagagcct

SEQ ID NO: 85 - DNA, 699 bp, Artificial Sequence
  Description of Artificial Sequence: Synthetic polynucleotide
atggagcactttttgccgctgcgcaacatctggaaccgcgtccgcgactttccgcgcgcctccaccaccgccgccggcatcacctggatgtccaggtacatctacggatatcatcgccttatgttggaagatctcgcccccggagccccggccaccctacgctggcccctctaccgccagccgccgccgcactttttggtgggataccagtacctggtgcggacttgcaacgactacgtatttgactcgagggcttactcgcgtctcaggtacaccgagctctcgcagccgggtcaccagaccgttaactggtccgttatggccaactgcacttacaccatcaacacgggcgcataccaccgctttgtggacatggatgacttccagtctaccctcacgcaggtgcagcaggccatattagccgagcgcgttgtcgccgacctagccctgcttcagccgatgaggggcttcggggtcacacgcatgggaggaagagggcgccacctacggccaaactccgccgccgccgcagcgatagatgcaagagatgcaggacaagaggaaggagaagaagaagtgccggtagaaaggctcatgcaagactactacaaagacctgcgccgatgtcaaaacgaagcctggggcatggccgaccgcctgcgcattcagcaggccggacccaaggacatggtgcttctg

SEQ ID NO: 86 - DNA, 1590 bp, Artificial Sequence
  Description of Artificial Sequence: Synthetic polynucleotide
atggccagtcgggaagaggagcagcgcgaaaccacccccgagcgcggacgcggtgcggcgcgacgtcccccaaccatggaggacgtgtcgtccccgtccccgtcgccgccgcctccccgggcgcccccaaaaaagcggatgaggcggcgtatcgagtccgaggacgaggaagactcatcacaagacgcgctggtgccgcgcacacccagcccgcggccatcgacctcggcggcggatttggccattgcgcccaagaagaaaaagaagcgcccttctcccaagcccgagcgcccgccatcaccagaggtaatcgtggacagcgaggaagaaagagaagatgtggcgctacaaatggtgggtttcagcaacccaccggtgctaatcaagcatggcaaaggaggtaagcgcacagtgcggcggctgaatgaagacgacccagtggcgcgtggtatgcggacgcaagaggaagaggaagagcccagcgaagcggaaagtgaaattacggtgatgaacccgctgagtgtgccgatcgtgtctgcgtgggagaagggcatggaggctgcgcgcgcgctgatggacaagtaccacgtggataacgatctaaaggcgaacttcaaactactgcctgaccaagtggaagctctggcggccgtatgcaagacctggctgaacgaggagcaccgcgggttgcagctgaccttcaccagcaacaagacctttgtgacgatgatggggcgattcctgcaggcgtacctgcagtcgtttgcagaggtgacctacaagcatcacgagcccacgggctgcgcgttgtggctgcaccgctgcgctgagatcgaaggcgagcttaagtgtctacacggaagcattatgataaataaggagcacgtgattgaaatggatgtgacgagcgaaaacgggcagcgcgcgctgaaggagcagtctagcaaggccaagatcgtgaagaaccggtggggccgaaatgtggtgcagatctccaacaccgacgcaaggtgctgcgtgcacgacgcggcctgtccggccaatcagttttccggcaagtcttgcggcatgttcttctctgaaggcgcaaaggctcaggtggcttttaagcagatcaaggcttttatgcaggcgctgtatcctaacgcccagaccgggcacggtcaccttttgatgccactacggtgcgagtgcaactcaaagcctgggcacgcgccctttttgggaaggcagctaccaaagttgactccgttcgccctgagcaacgcggaggacctggacgcggatctgatctccgacaagagcgtgctggccagcgtgcaccacccggcgctgatagtgttccagtgctgcaaccctgtgtatcgcaactcgcgcgcgcagggcggaggccccaactgcgacttcaagatatcggcgcccgacctgctaaacgcgttggtgatggtgcgcagcctgtggagtgaaaacttcaccgagctgccgcggatggttgtgcctgagtttaagtggagcactaaacaccagtatcgcaacgtgtccctgccagtggcgcatagcgatgcgcggcagaacccctttgatttttaa

SEQ ID NO: 87 - DNA, 278 bp, Artificial Sequence
  Description of Artificial Sequence: Synthetic polynucleotide
tcgaggtgagccccacgttctgcttcactctccccatctcccccccctccccacccccaattttgtatttatttattttttaattattttgtgcagcgatgggggcggggggggggggggggcgcgcgccaggcggggcggggcggggcgaggggcggggcggggcgaggcggagaggtgcggcggcagccaatcagagcggcgcgctccgaaagtttccttttatggcgaggcggcggcggcggcggccctataaaaagcgaagcgcgcggcgggcg

SEQ ID NO: 88 - DNA, 35 bp, Artificial Sequence
  Description of Artificial Sequence: Synthetic oligonucleotide
acggcgcagacggcaagggtgggggtaaataatca

SEQ ID NO: 89 - DNA, 387 bp, Artificial Sequence
  Description of Artificial Sequence: Synthetic polynucleotide
atggctgccgctgtggaagcgctgtatgttgttctggagcgggagggtgctattttgcctaggcaggagggtttttcaggtgtttatgtgtttttctctcctattaattttgttatacctcctatgggggctgtaatgttgtctctacgcctgcgggtatgtattcccccgggctatttcggtcgctttttagcactgaccgatgtgaatcaacctgatgtgtttaccgagtcttacattatgactccggacatgaccgaggagctgtcggtggtgctttttaatcacggtgaccagtttttttacggtcacgccggcatggccgtagtccgtcttatgcttataagggttgtttttcctgttgtaagacaggcttctaatgtttaa

SEQ ID NO: 90 - DNA, 411 bp, Artificial Sequence
  Description of Artificial Sequence: Synthetic polynucleotide
atgcagaaacccgcagacatgtttgagagaaaaatggtgtctttttctgtggtggttccggagcttacctgcctttatctgcatgagcatgactacgatgtgctttcttttttgcgcgaggctttgcctgattttttgagcagcaccttgcattttatatcgccgcccatgcaacaagcttacatcggggctacgctggttagcatagctccgagtatgcgtgtcataatcagtgtgggttcttttgtcatggttcctggcggggaagtggccgcgctggtccgtgcagacctgcacgattatgttcagctggccctgcgaagggacctacgggatcgcggtatttttgttaatgttccgcttttgaatcttatacaggtctgtgaggaacctgaatttttgcaatcatga

SEQ ID NO: 91 - DNA, 351 bp, Artificial Sequence
  Description of Artificial Sequence: Synthetic polynucleotide
atgattcgctgcttgaggctgaaggtggagggcgctctggagcagatttttacaatggccggacttaatattcgggatttgcttagagatatattgagaaggtggcgagatgagaattatttgggcatggttgaaggtgctggaatgtttatagaggagattcaccctgaagggtttagcctttacgtccacttggacgtgagggccgtttgccttttggaagccattgtgcaacatcttacaaatgccattatctgttctttggctgtagagtttgaccacgccaccggaggggagcgcgttcacttaatagatcttcattttgaggttttggataatcttttggaataa

SEQ ID NO: 92 - DNA, 345 bp, Artificial Sequence
  Description of Artificial Sequence: Synthetic polynucleotide
atggttcttccagctcttcccgctcctcccgtgtgtgactcgcagaacgaatgtgtaggttggctgggtgtggcttattctgcggtggtggatgttatcagggcagcggcgcatgaaggagtttacatagaacccgaagccagggggcgcctggatgctttgagagagtggatatactacaactactacacagagcgatctaagcggcgagaccggagacgcagatctgtttgtcacgcccgcacctggttttgcttcaggaaatatgactacgtccggcgttccatttggcatgacactacgaccaacacgatctcggttgtctcggcgcactccgtacagtag

SEQ ID NO: 93 - DNA, 885 bp, Artificial Sequence
  Description of Artificial Sequence: Synthetic polynucleotide
atgactacgtccggcgttccatttggcatgacactacgaccaacacgatctcggttgtctcggcgcactccgtacagtagggatcgtctacctccttttgagacagaaacccgcgctaccatactggaggatcatccgctgctgcccgaatgtaacactttgacaatgcacaacgtgagttacgtgcgaggtcttccctgcagtgtgggatttacgctgattcaggaatgggttgttccctgggatatggttctaacgcgggaggagcttgtaatcctgaggaagtgtatgcacgtgtgcctgtgttgtgccaacattgatatcatgacgagcatgatgatccatggttacgagtcctgggctctccactgtcattgttccagtcccggttccctgcagtgtatagccggcgggcaggttttggccagctggtttaggatggtggtggatggcgccatgtttaatcagaggtttatatggtaccgggaggtggtgaattacaacatgccaaaagaggtaatgtttatgtccagcgtgtttatgaggggtcgccacttaatctacctgcgcttgtggtatgatggccacgtgggttctgtggtccccgccatgagctttggatacagcgccttgcactgtgggattttgaacaatattgtggtgctgtgctgcagttactgtgctgatttaagtgagatcagggtgcgctgctgtgcccggaggacaaggcgccttatgctgcgggcggtgcgaatcatcgctgaggagaccactgccatgttgtattcctgcaggacggagcggcggcggcagcagtttattcgcgcgctgctgcagcaccaccgccctatcctgatgcacgattatgactctacccccatgtag

SEQ ID NO: 94 - DNA, 11366 bp, Artificial Sequence
  Description of Artificial Sequence: Synthetic polynucleotide
tgcagctctggcccgtgtctcaaaatctctgatgttacattgcacaagataaaaatatatcatcatgaacaataaaactgtctgcttacataaacagtaatacaaggggtgttatgagccatattcaacgggaaacgtcgaggccgcgattaaattccaacatggatgctgatttatatgggtataaatgggctcgcgataatgtcgggcaatcaggtgcgacaatctatcgcttgtatgggaagcccgatgcgccagagttgtttctgaaacatggcaaaggtagcgttgccaatgatgttacagatgagatggtcagactaaactggctgacggaatttatgcctcttccgaccatcaagcattttatccgtactcctgatgatgcatggttactcaccactgcgatccccggaaaaacagcattccaggtattagaagaatatcctgattcaggtgaaaatattgttgatgcgctggcagtgttcctgcgccggttgcattcgattcctgtttgtaattgtccttttaacagcgatcgcgtatttcgtctcgctcaggcgcaatcacgaatgaataacggtttggttgatgcgagtgattttgatgacgagcgtaatggctggcctgttgaacaagtctggaaagaaatgcataaacttttgccattctcaccggattcagtcgtcactcatggtgatttctcacttgataaccttatttttgacgaggggaaattaataggttgtattgatgttggacgagtcggaatcgcagaccgataccaggatcttgccatcctatggaactgcctcggtgagttttctccttcattacagaaacggctttttcaaaaatatggtattgataatcctgatatgaataaattgcagtttcatttgatgctcgatgagtttttctaatcagaattggttaattggttgtaacattattcagattgggcttgatttaaaacttcatttttaatttaaaaggatctaggtgaagatcctttttgataatctcatgaccaaaatcccttaacgtgagttttcgttccactgagcgtcagaccccgtagaaaagatcaaaggatcttcttgagatcctttttttctgcgcgtaatctgctgcttgcaaacaaaaaaaccaccgctaccagcggtggtttgtttgccggatcaagagctaccaactctttttccgaaggtaactggcttcagcagagcgcagataccaaatactgttcttctagtgtagccgtagttaggccaccacttcaagaactctgtagcaccgcctacatacctcgctctgctaatcctgttaccagtggctgctgccagtggcgataagtcgtgtcttaccgggttggactcaagacgatagttaccggataaggcgcagcggtcgggctgaacggggggttcgtgcacacagcccagcttggagcgaacgacctacaccgaactgagatacctacagcgtgagctatgagaaagcgccacgcttcccgaagggagaaaggcggacaggtatccggtaagcggcagggtcggaacaggagagcgcacgagggagcttccagggggaaacgcctggtatctttatagtcctgtcgggtttcgccacctctgacttgagcgtcgatttttgtgatgctcgtcaggggggcggagcctatggaaaaacgccagcaacgcggcctttttacggttcctggccttttgctggccttttgctcacatgttctttcctgcgttatcccctgattctgtggataaccgtattaccgcctttgagtgagctgataccgctcgccgcagccgaacgaccgagcgcagcgagtcagtgagcgaggaagcggaagagcgcccaatacgcaaaccgcctctccccgcgcgttggccgattcattaatgcagctggcacgacaggtttcccgactggaaagcgggcagtgagcgcaacgcaattaatgtgagttagctcactcattaggcaccccaggctttacactttatgcttccggctcgtatgttgtgtggaattgtgagcggataacaatttcacacaggaaacagctatgaccatgattacaccaagcttgcatgcaggcctatccgtagatgtacctggacatccaggtgatgccggcggcggtggtggaggcgcgcggaaagtcgcggacgcggttccagatgttgcgcagcggcaaaaagtgctccatggtcgggacgctctggccggtgaggcgtgcgcagtcgttgacgctctagaccgtgcaaaaggagagcctgtaagcgggcactcttccgtggtctggtggataaattcgcaagggtatcatggcggacgaccggggttcgaaccccggatccggccgtccgccgtgatccatgcggttaccgcccgcgtgtcgaacccaggtgtgcgacgtcagacaacgggggagcgctccttttggcttccttccaggcgcggcggctgctgcgctagcttttttggccactggccgcgcgcggcgtaagcggttaggctggaaagcgaaagcattaagtggctcgctccctgtagccggagggttattttccaagggttgagtcgcaggacccccggttcgagtctcgggccggccggactgcggcgaacgggggtttgcctccccgtcatgcaagaccccgcttgcaaattcctccggaaacagggacgagccccttttttgcttttcccagatgcatccggtgctgcggcagatgcgcccccctcctcagcagcggcaagagcaagagcagcggcagacatgcagggcaccctccccttctcctaccgcgtcaggaggggcaacatcgatccagacatgataagatacattgatgagtttggacaaaccacaactagaatgcagtgaaaaaaatgctttatttgtgaaatttgtgatgctattgctttatttgtaaccattataagctgcaataaacaagtttgtacactctcgggtgattatttacccccacccttgccgtctgcgccgtttaaaaatcaaaggggttctgccgcgcatcgctatgcgccactggcagggacacgttgcgatactggtgtttagtgctccacttaaactcaggcacaaccatccgcggcagctcggtgaagttttcactccacaggctgcgcaccatcaccaacgcgtttagcaggtcgggcgccgatatcttgaagtcgcagttggggcctccgccctgcgcgcgcgagttgcgatacacagggttgcagcactggaacactatcagcgccgggtggtgcacgctggccagcacgctcttgtcggagatcagatccgcgtccaggtcctccgcgttgctcagggcgaacggagtcaactttggtagctgccttcccaaaaagggcgcgtgcccaggctttgagttgcactcgcaccgtagtggcatcaaaaggtgaccgtgcccggtctgggcgttaggatacagcgcctgcataaaagccttgatctgcttaaaagccacctgagcctttgcgccttcagagaagaacatgccgcaagacttgccggaaaactgattggccggacaggccgcgtcgtgcacgcagcaccttgcgtcggtgttggagatctgcaccacatttcggccccaccggttcttcacgatcttggccttgctagactgctccttcagcgcgcgctgcccgttttcgctcgtcacatccatttcaatcacgtgctccttatttatcataatgcttccgtgtagacacttaagctcgccttcgatctcagcgcagcggtgcagccacaacgcgcagcccgtgggctcgtgatgcttgtaggtcacctctgcaaacgactgcaggtacgcctgcaggaatcgccccatcatcgtcacaaaggtcttgttgctggtgaaggtcagctgcaacccgcggtgctcctcgttcagccaggtcttgcatacggccgccagagcttccacttggtcaggcagtagtttgaagttcgcctttagatcgttatccacgtggtacttgtccatcagcgcgcgcgcagcctccatgcccttctcccacgcagacacgatcggcacactcagcgggttcatcaccgtaatttcactttccgcttcgctgggctcttcctcttcctcttgcgtccgcataccacgcgccactgggtcgtcttcattcagccgccgcactgtgcgcttacctcctttgccatgcttgattagcaccggtgggttgctgaaacccaccatttgtagcgccacatcttctctttcttcctcgctgtccacgattacctctggtgatggcgggcgctcgggcttgggagaagggcgcttctttttcttcttgggcgcaatggccaaatccgccgccgaggtcgatggccgcgggctgggtgtgcgcggcaccagcgcgtcttgtgatgagtcttcctcgtcctcggactcgatacgccgcctcatccgcttttttgggggcgcccggggaggcggcggcgacggggacggggacgacacgtcctccatggttgggggacgtcgcgccgcaccgcgtccgcgctcgggggtggtttcgcgctgctcctcttcccgactggccatttccttctcctataggcagaaaaagatcatggagtcagtcgagaagaaggacagcctaaccgccccctctgagttcgccaccaccgcctccaccgatgccgccaacgcgcctaccaccttccccgtcgaggcacccccgcttgaggaggaggaagtgattatcgagcaggacccaggttttgtaagcgaagacgacgaggaccgctcagtaccaacagaggataaaaagcaagaccaggacaacgcagaggcaaacgaggaacaagtcgggcggggggacgaaaggcatggcgactacctagatgtgggagacgacgtgctgttgaagcatctgcagcgccagtgcgccattatctgcgacgcgttgcaagagcgcagcgatgtgcccctcgccatagcggatgtcagccttgcctacgaacgccacctattctcaccgcgcgtaccccccaaacgccaagaaaacggcacatgcgagcccaacccgcgcctcaacttctaccccgtatttgccgtgccagaggtgcttgccacctatcacatctttttccaaaactgcaagatacccctatcctgccgtgccaaccgcagccgagcggacaagcagctggccttgcggcagggcgctgtcatacctgatatcgcctcgctcaacgaagtgccaaaaatctttgagggtcttggacgcgacgagaagcgcgcggcaaacgctctgcaacaggaaaacagcgaaaatgaaagtcactctggagtgttggtggaactcgagggtgacaacgcgcgcctagccgtactaaaacgcagcatcgaggtcacccactttgcctacccggcacttaacctaccccccaaggtcatgagcacagtcatgagtgagctgatcgtgcgccgtgcgcagcccctggagagggatgcaaatttgcaagaacaaacagaggagggcctacccgcagttggcgacgagcagctagcgcgctggcttcaaacgcgcgagcctgccgacttggaggagcgacgcaaactaatgatggccgcagtgctcgttaccgtggagcttgagtgcatgcagcggttctttgctgacccggagatgcagcgcaagctagaggaaacattgcactacacctttcgacagggctacgtacgccaggcctgcaagatctccaacgtggagctctgcaacctggtctcctaccttggaattttgcacgaaaaccgccttgggcaaaacgtgcttcattccacgctcaagggcgaggcgcgccgcgactacgtccgcgactgcgtttacttatttctatgctacacctggcagacggccatgggcgtttggcagcagtgcttggaggagtgcaacctcaaggagctgcagaaactgctaaagcaaaacttgaaggacctatggacggccttcaacgagcgctccgtggccgcgcacctggcggacatcattttccccgaacgcctgcttaaaaccctgcaacagggtctgccagacttcaccagtcaaagcatgttgcagaactttaggaactttatcctagagcgctcaggaatcttgcccgccacctgctgtgcacttcctagcgactttgtgcccattaagtaccgcgaatgccctccgccgctttggggccactgctaccttctgcagctagccaactaccttgcctaccactctgacataatggaagacgtgagcggtgacggtctactggagtgtcactgtcgctgcaacctatgcaccccgcaccgctccctggtttgcaattcgcagctgcttaacgaaagtcaaattatcggtacctttgagctgcagggtccctcgcctgacgaaaagtccgcggctccggggttgaaactcactccggggctgtggacgtcggcttaccttcgcaaatttgtacctgaggactaccacgcccacgagattaggttctacgaagaccaatcccgcccgcctaatgcggagcttaccgcctgcgtcattacccagggccacattcttggccaattgcaagccatcaacaaagcccgccaagagtttctgctacgaaagggacggggggtttacttggacccccagtccggcgaggagctcaacccaatccccccgccgccgcagccctatcagcagcagccgcgggcccttgcttcccaggatggcacccaaaaagaagctgcagctgccgccgccacccacggacgaggaggaatactgggacagtcaggcagaggaggttttggacgaggaggaggaggacatgatggaagactgggagagcctagacgaggaagcttccgaggtcgaagaggtgtcagacgaaacaccgtcaccctcggtcgcattcccctcgccggcgccccagaaatcggcaaccggttccagcatggctacaacctccgctcctcaggcgccgccggcactgcccgttcgccgacccaaccgtagatgggacaccactggaaccagggccggtaagtccaagcagccgccgccgttagcccaagagcaacaacagcgccaaggctaccgctcatggcgcgggcacaagaacgccatagttgcttgcttgcaagactgtgggggcaacatctccttcgcccgccgctttcttctctaccatcacggcgtggccttcccccgtaacatcctgcattactaccgtcatctctacagcccatactgcaccggcggcagcggcagcaacagcagcggccacacagaagcaaaggcgaccggatagcaagactctgacaaagcccaagaaatccacagcggcggcagcagcaggaggaggagcgctgcgtctggcgcccaacgaacccgtatcgacccgcgagcttagaaacaggatttttcccactctgtatgctatatttcaacagagcaggggccaagaacaagagctgaaaataaaaaacaggtctctgcgatccctcacccgcagctgcctgtatcacaaaagcgaagatcagcttcggcgcacgctggaagacgcggaggctctcttcagtaaatactgcgcgctgactcttaaggactagtttcgcgccctttctcaaatttaagcgcgaaaactacgtcatctccagcggccacacccggcgccagcacctgttgtcagcgccattatgagcaaggaaattcccacgccctacatgtggagttaccagccacaaatgggacttgcggctggagctgcccaagactactcaacccgaataaactacatgagcgcggggcggccgccgtttgtgttatgtttcaacgtgtttatttttcaattgcagaaaatttcaagtcatttttcattcagtagtatagccccaccaccacatagcttatacagatcaccgtaccttaatcaaactcacagaaccctagtattcaacctgccacctccctcccaacacacagagtacacagtcctttctccccggctggccttaaaaagcatcatatcatgggtaacagacatattcttaggtgttatattccacacggtttcctgtcgagccaaacgctcatcagtgatattaataaactccccgggcagctcacttaagttcatgtcgctgtccagctgctgagccacaggctgctgtccaacttgcggttgcttaacgggcggcgaaggagaagtccacgcctacatgggggtagagtcataatcgtgcatcaggatagggcggtggtgctgcagcagcgcgcgaataaactgctgccgccgccgctccgtcctgcaggaatacaacatggcagtggtctcctcagcgatgattcgcaccgcccgcagcataaggcgccttgtcctccgggcacagcagcgcaccctgatctcacttaaatcagcacagtaactgcagcacagcaccacaatattgttcaaaatcccacagtgcaaggcgctgtatccaaagctcatggcggggaccacagaacccacgtggccatcataccacaagcgcaggtagattaagtggcgacccctcataaacacgctggacataaacattacctcttttggcatgttgtaattcaccacctcccggtaccatataaacctctgattaaacatggcgccatccaccaccatcctaaaccagctggccaaaacctgcccgccggctatacactgcagggaaccgggactggaacaatgacagtggagagcccaggactcgtaaccatggatcatcatgctcgtcatgatatcaatgttggcacaacacaggcacacgtgcatacacttcctcaggattacaagctcctcccgcgttagaaccatatcccagggaacaacccattcctgaatcagcgtaaatcccacactgcagggaagacctcgcacgtaactcacgttgtgcattgtcaaagtgttacattcgggcagcagcggatgatcctccagtatggtagcgcgggtttctgtctcaaaaggaggtagacgatccctactgtacggagtgcgccgagacaaccgagatcgtgttggtcgtagtgtcatgccaaatggaacgccggacgtagtcatatttcctgaagcaaaaccaggtgcgggcgtgacaaacagatctgcgtctccggtctcgccgcttagatcgctctgtgtagtagttgtagtatatccactctctcaaagcatccaggcgccccctggcttcgggttctatgtaaactccttcatgcgccgctgccctgataacatccaccaccgcagaataagccacacccagccaacctacacattcgttctgcgagtcacacacgggaggagcgggaagagctggaagaaccatgtttttttttttattccaaaagattatccaaaacctcaaaatgaagatctattaagtgaacgcgctcccctccggtggcgtggtcaaactctacagccaaagaacagataatggcatttgtaagatgttgcacaatggcttccaaaaggcaaacggccctcacgtccaagtggacgtaaaggctaaacccttcagggtgaatctcctctataaacattccagcaccttcaaccatgcccaaataattctcatctcgccaccttctcaatatatctctaagcaaatcccgaatattaagtccggccattgtaaaaatctgctccagagcgccctccaccttcagcctcaagcagcgaatcatgattgcaaaaattcaggttcctcacagacctgtataagattcaaaagcggaacattaacaaaaataccgcgatcccgtaggtcccttcgcagggccagctgaacataatcgtgcaggtctgcacggaccagcgcggccacttccccgccaggaaccatgacaaaagaacccacactgattatgacacgcatactcggagctatgctaaccagcgtagccccgatgtaagcttgttgcatgggcggcgatataaaatgcaaggtgctgctcaaaaaatcaggcaaagcctcgcgcaaaaaagaaagcacatcgtagtcatgctcatgcagataaaggcaggtaagctccggaaccaccacagaaaaagacaccatttttctctcaaacatgtctgcgggtttctgcataaacacaaaataaaataacaaaaaaacatttaaacattagaagcctgtcttacaacaggaaaaacaacccttataagcataagacggactacggccatgccggcgtgaccgtaaaaaaactggtcaccgtgattaaaaagcaccaccgacagctcctcggtcatgtccggagtcataatgtaagactcggtaaacacatcaggttgattcacatcggtcagtgctaaaaagcgaccgaaatagcccgggggaatacatacccgcaggcgtagagacaacattacagcccccataggaggtataacaaaattaataggagagaaaaacacataaacacctgaaaaaccctcctgcctaggcaaaatagcaccctcccgctccagaacaacatacagcgcttccacagcggcagccataacagtcagccttaccagtaaaaaagaaaacctattaaaaaaacaccactcgacacggcaccagctcaatcagtcacagtgtaaaaaagggccaagtgcagagcgagtatatataggactaaaaaatgacgtaacggttaaagtccacaaaaaacacccagaaaaccgcacgcgaacctacgcccagaaacgaaagccaaaaaacccacaacttcctcaaatcgtcacttccgttttcccacgttacgtcacttcccattttaagaaaactacaattcccaacacatacaagttactccgcccttaattaaatcggatccgatatctagatgtattcgcgaggtaccgagctcgaattctctggccgtcgttttacaacgtcgtgactgggaaaaccctggcgttacccaacttaatcgccttgcagcacatccccctttcgccagctggcgtaatagcgaagaggcccgcaccgatcgcccttcccaacagttgcgcagcctgaatggcgaatggcgcctgatgcggtattttctccttacgcatctgtgcggtatttcacaccgcatatggtgcactctcagtacaatctgctctgatgccgcatagttaagccagccccgacacccgccaacacccgctgacgcgccctgacgggcttgtctgctcccggcatccgcttacagacaagctgtgaccgtctccgggagctgcatgtgtcagaggttttcaccgtcatcaccgaaacgcgcga

SEQ ID NO: 95 - DNA, 11119 bp, Artificial Sequence
  Description of Artificial Sequence: Synthetic polynucleotide
tgcagctctggcccgtgtctcaaaatctctgatgttacattgcacaagataaaaatatatcatcatgaacaataaaactgtctgcttacataaacagtaatacaaggggtgttatgagccatattcaacgggaaacgtcgaggccgcgattaaattccaacatggatgctgatttatatgggtataaatgggctcgcgataatgtcgggcaatcaggtgcgacaatctatcgcttgtatgggaagcccgatgcgccagagttgtttctgaaacatggcaaaggtagcgttgccaatgatgttacagatgagatggtcagactaaactggctgacggaatttatgcctcttccgaccatcaagcattttatccgtactcctgatgatgcatggttactcaccactgcgatccccggaaaaacagcattccaggtattagaagaatatcctgattcaggtgaaaatattgttgatgcgctggcagtgttcctgcgccggttgcattcgattcctgtttgtaattgtccttttaacagcgatcgcgtatttcgtctcgctcaggcgcaatcacgaatgaataacggtttggttgatgcgagtgattttgatgacgagcgtaatggctggcctgttgaacaagtctggaaagaaatgcataaacttttgccattctcaccggattcagtcgtcactcatggtgatttctcacttgataaccttatttttgacgaggggaaattaataggttgtattgatgttggacgagtcggaatcgcagaccgataccaggatcttgccatcctatggaactgcctcggtgagttttctccttcattacagaaacggctttttcaaaaatatggtattgataatcctgatatgaataaattgcagtttcatttgatgctcgatgagtttttctaatcagaattggttaattggttgtaacattattcagattgggcttgatttaaaacttcatttttaatttaaaaggatctaggtgaagatcctttttgataatctcatgaccaaaatcccttaacgtgagttttcgttccactgagcgtcagaccccgtagaaaagatcaaaggatcttcttgagatcctttttttctgcgcgtaatctgctgcttgcaaacaaaaaaaccaccgctaccagcggtggtttgtttgccggatcaagagctaccaactctttttccgaaggtaactggcttcagcagagcgcagataccaaatactgttcttctagtgtagccgtagttaggccaccacttcaagaactctgtagcaccgcctacatacctcgctctgctaatcctgttaccagtggctgctgccagtggcgataagtcgtgtcttaccgggttggactcaagacgatagttaccggataaggcgcagcggtcgggctgaacggggggttcgtgcacacagcccagcttggagcgaacgacctacaccgaactgagatacctacagcgtgagctatgagaaagcgccacgcttcccgaagggagaaaggcggacaggtatccggtaagcggcagggtcggaacaggagagcgcacgagggagcttccagggggaaacgcctggtatctttatagtcctgtcgggtttcgccacctctgacttgagcgtcgatttttgtgatgctcgtcaggggggcggagcctatggaaaaacgccagcaacgcggcctttttacggttcctggccttttgctggccttttgctcacatgttctttcctgcgttatcccctgattctgtggataaccgtattaccgcctttgagtgagctgataccgctcgccgcagccgaacgaccgagcgcagcgagtcagtgagcgaggaagcggaagagcgcccaatacgcaaaccgcctctccccgcgcgttggccgattcattaatgcagctggcacgacaggtttcccgactggaaagcgggcagtgagcgcaacgcaattaatgtgagttagctcactcattaggcaccccaggctttacactttatgcttccggctcgtatgttgtgtggaattgtgagcggataacaatttcacacaggaaacagctatgaccatgattacaccaagcttgcatgcaggcctatccgtagatgtacctggacatccaggtgatgccggcggcggtggtggaggcgcgcggaaagtcgcggacgcggttccagatgttgcgcagcggcaaaaagtgctccatggtcgggacgctctggccggtgaggcgtgcgcagtcgttgacgctctagaccgtgcaaaaggagagcctgtaagcgggcactcttccgtggtctggtggataaattcgcaagggtatcatggcggacgaccggggttcgaaccccggatccggccgtccgccgtgatccatgcggttaccgcccgcgtgtcgaacccaggtgtgcgacgtcagacaacgggggagcgctccttttggcttccttccaggcgcggcggctgctgcgctagcttttttggccactggccgcgcgcggcgtaagcggttaggctggaaagcgaaagcattaagtggctcgctccctgtagccggagggttattttccaagggttgagtcgcaggacccccggttcgagtctcgggccggccggactgcggcgaacgggggtttgcctccccgtcatgcaagaccccgcttgcaaattcctccggaaacagggacgagccccttttttgcttttcccagatgcatccggtgctgcggcagatgcgcccccctcctcagcagcggcaagagcaagagcagcggcagacatgcagggcaccctccccttctcctaccgcgtcaggaggggcaacatcgatccagacatgataagatacattgatgagtttggacaaaccacaactagaatgcagtgaaaaaaatgctttatttgtgaaatttgtgatgctattgctttatttgtaaccattataagctgcaataaacaagtttgtacactctcgggtgattatttacccccacccttgccgtctgcgccgtttaaaaatcaaaggggttctgccgcgcatcgctatgcgccactggcagggacacgttgcgatactggtgtttagtgctccacttaaactcaggcacaaccatccgcggcagctcggtgaagttttcactccacaggctgcgcaccatcaccaacgcgtttagcaggtcgggcgccgatatcttgaagtcgcagttggggcctccgccctgcgcgcgcgagttgcgatacacagggttgcagcactggaacactatcagcgccgggtggtgcacgctggccagcacgctcttgtcggagatcagatccgcgtccaggtcctccgcgttgctcagggcgaacggagtcaactttggtagctgccttcccaaaaagggcgcgtgcccaggctttgagttgcactcgcaccgtagtggcatcaaaaggtgaccgtgcccggtctgggcgttaggatacagcgcctgcataaaagccttgatctgcttaaaagccacctgagcctttgcgccttcagagaagaacatgccgcaagacttgccggaaaactgattggccggacaggccgcgtcgtgcacgcagcaccttgcgtcggtgttggagatctgcaccacatttcggccccaccggttcttcacgatcttggccttgctagactgctccttcagcgcgcgctgcccgttttcgctcgtcacatccatttcaatcacgtgctccttatttatcataatgcttccgtgtagacacttaagctcgccttcgatctcagcgcagcggtgcagccacaacgcgcagcccgtgggctcgtgatgcttgtaggtcacctctgcaaacgactgcaggtacgcctgcaggaatcgccccatcatcgtcacaaaggtcttgttgctggtgaaggtcagctgcaacccgcggtgctcctcgttcagccaggtcttgcatacggccgccagagcttccacttggtcaggcagtagtttgaagttcgcctttagatcgttatccacgtggtacttgtccatcagcgcgcgcgcagcctccatgcccttctcccacgcagacacgatcggcacactcagcgggttcatcaccgtaatttcactttccgcttcgctgggctcttcctcttcctcttgcgtccgcataccacgcgccactgggtcgtcttcattcagccgccgcactgtgcgcttacctcctttgccatgcttgattagcaccggtgggttgctgaaacccaccatttgtagcgccacatcttctctttcttcctcgctgtccacgattacctctggtgatggcgggcgctcgggcttgggagaagggcgcttctttttcttcttgggcgcaatggccaaatccgccgccgaggtcgatggccgcgggctgggtgtgcgcggcaccagcgcgtcttgtgatgagtcttcctcgtcctcggactcgatacgccgcctcatccgcttttttgggggcgcccggggaggcggcggcgacggggacggggacgacacgtcctccatggttgggggacgtcgcgccgcaccgcgtccgcgctcgggggtggtttcgcgctgctcctcttcccgactggccatttccttctcctataggcagaaaaagatcatggagtcagtcgagaagaaggacagcctaaccgccccctctgagttcgccaccaccgcctccaccgatgccgccaacgcgcctaccaccttccccgtcgaggcacccccgcttgaggaggaggaagtgattatcgagcaggacccaggttttgtaagcgaagacgacgaggaccgctcagtaccaacagaggataaaaagcaagaccaggacaacgcagaggcaaacgaggaacaagtcgggcggggggacgaaaggcatggcgactacctagatgtgggagacgacgtgctgttgaagcatctgcagcgccagtgcgccattatctgcgacgcgttgcaagagcgcagcgatgtgcccctcgccatagcggatgtcagccttgcctacgaacgccacctattctcaccgcgcgtaccccccaaacgccaagaaaacggcacatgcgagcccaacccgcgcctcaacttctaccccgtatttgccgtgccagaggtgcttgccacctatcacatctttttccaaaactgcaagatacccctatcctgccgtgccaaccgcagccgagcggacaagcagctggccttgcggcagggcgctgtcatacctgatatcgcctcgctcaacgaagtgccaaaaatctttgagggtcttggacgcgacgagaagcgcgcggcaaacgctctgcaacaggaaaacagcgaaaatgaaagtcactctggagtgttggtggaactcgagggtgacaacgcgcgcctagccgtactaaaacgcagcatcgaggtcacccactttgcctacccggcacttaacctaccccccaaggtcatgagcacagtcatgagtgagctgatcgtgcgccgtgcgcagcccctggagagggatgcaaatttgcaagaacaaacagaggagggcctacccgcagttggcgacgagcagctagcgcgctggcttcaaacgcgcgagcctgccgacttggaggagcgacgcaaactaatgatggccgcagtgctcgttaccgtggagcttgagtgcatgcagcggttctttgctgacccggagatgcagcgcaagctagaggaaacattgcactacacctttcgacagggctacgtacgccaggcctgcaagatctccaacgtggagctctgcaacctggtctcctaccttggaattttgcacgaaaaccgccttgggcaaaacgtgcttcattccacgctcaagggcgaggcgcgccgcgactacgtccgcgactgcgtttacttatttctatgctacacctggcagacggccatgggcgtttggcagcagtgcttggaggagtgcaacctcaaggagctgcagaaactgctaaagcaaaacttgaaggacctatggacggccttcaacgagcgctccgtggccgcgcacctggcggacatcattttccccgaacgcctgcttaaaaccctgcaacagggtctgccagacttcaccagtcaaagcatgttgcagaactttaggaactttatcctagagcgctcaggaatcttgcccgccacctgctgtgcacttcctagcgactttgtgcccattaagtaccgcgaatgccctccgccgctttggggccactgctaccttctgcagctagccaactaccttgcctaccactctgacataatggaagacgtgagcggtgacggtctactggagtgtcactgtcgctgcaacctatgcaccccgcaccgctccctggtttgcaattcgcagctgcttaacgaaagtcaaattatcggtacctttgagctgcagggtccctcgcctgacgaaaagtccgcggctccggggttgaaactcactccggggctgtggacgtcggcttaccttcgcaaatttgtacctgaggactaccacgcccacgagattaggttctacgaagaccaatcccgcccgcctaatgcggagcttaccgcctgcgtcattacccagggccacattcttggccaattgcaagccatcaacaaagcccgccaagagtttctgctacgaaagggacggggggtttacttggacccccagtccggcgaggagctcaacccaatccccccgccgccgcagccctatcagcagcagccgcgggcccttgcttcccaggatggcacccaaaaagaagctgcagctgccgccgccacccacggacgaggaggaatactgggacagtcaggcagaggaggttttggacgaggaggaggaggacatgatggaagactgggagagcctagacgaggaagcttccgaggtcgaagaggtgtcagacgaaacaccgtcaccctcggtcgcattcccctcgccggcgccccagaaatcggcaaccggttccagcatggctacaacctccgctcctcaggcgccgccggcactgcccgttcgccgacccaaccgtagatgggacaccactggaaccagggccggtaagtccaagcagccgccgccgttagcccaagagcaacaacagcgccaaggctaccgctcatggcgcgggcacaagaacgccatagttgcttgcttgcaagactgtgggggcaacatctccttcgcccgccgctttcttctctaccatcacggcgtggccttcccccgtaacatcctgcattactaccgtcatctctacagcccatactgcaccggcggcagcggcagcaacagcagcggccacacagaagcaaaggcgaccggatagcaagactctgacaaagcccaagaaatccacagcggcggcagcagcaggaggaggagcgctgcgtctggcgcccaacgaacccgtatcgacccgcgagcttagaaacaggatttttcccactctgtatgctatatttcaacagagcaggggccaagaacaagagctgaaaataaaaaacaggtctctgcgatccctcacccgcagctgcctgtatcacaaaagcgaagatcagcttcggcgcacgctggaagacgcggaggctctcttcagtaaatactgcgcgctgactcttaaggactagtttcgcgccctttctcaaatttaagcgcgaaaactacgtcatctccagcggccacacccggcgccagcacctgttgtcagcgccattatgagcaaggaaattcccacgccctacatgtggagttaccagccacaaatgggacttgcggctggagctgcccaagactactcaacccgaataaactacatgagcgcggggcggccgcaacttgtttattgcagcttataatggttacaaataaagcaatagcatcacaaatttcacaaataaagcatttttttcactgcattctagttgtggtttgtccaaactcatcaatgtatcttagcttaacgggcggcgaaggagaagtccacgcctacatgggggtagagtcataatcgtgcatcaggatagggcggtggtgctgcagcagcgcgcgaataaactgctgccgccgccgctccgtcctgcaggaatacaacatggcagtggtctcctcagcgatgattcgcaccgcccgcagcataaggcgccttgtcctccgggcacagcagcgcaccctgatctcacttaaatcagcacagtaactgcagcacagcaccacaatattgttcaaaatcccacagtgcaaggcgctgtatccaaagctcatggcggggaccacagaacccacgtggccatcataccacaagcgcaggtagattaagtggcgacccctcataaacacgctggacataaacattacctcttttggcatgttgtaattcaccacctcccggtaccatataaacctctgattaaacatggcgccatccaccaccatcctaaaccagctggccaaaacctgcccgccggctatacactgcagggaaccgggactggaacaatgacagtggagagcccaggactcgtaaccatggatcatcatgctcgtcatgatatcaatgttggcacaacacaggcacacgtgcatacacttcctcaggattacaagctcctcccgcgttagaaccatatcccagggaacaacccattcctgaatcagcgtaaatcccacactgcagggaagacctcgcacgtaactcacgttgtgcattgtcaaagtgttacattcgggcagcagcggatgatcctccagtatggtagcgcgggtttctgtctcaaaaggaggtagacgatccctactgtacggagtgcgccgagacaaccgagatcgtgttggtcgtagtgtcatgccaaatggaacgccggacgtagtcatatttcctgaagcaaaaccaggtgcgggcgtgacaaacagatctgcgtctccggtctcgccgcttagatcgctctgtgtagtagttgtagtatatccactctctcaaagcatccaggcgccccctggcttcgggttctatgtaaactccttcatgcgccgctgccctgataacatccaccaccgcagaataagccacacccagccaacctacacattcgttctgcgagtcacacacgggaggagcgggaagagctggaagaaccatgtttttttttttattccaaaagattatccaaaacctcaaaatgaagatctattaagtgaacgcgctcccctccggtggcgtggtcaaactctacagccaaagaacagataatggcatttgtaagatgttgcacaatggcttccaaaaggcaaacggccctcacgtccaagtggacgtaaaggctaaacccttcagggtgaatctcctctataaacattccagcaccttcaaccatgcccaaataattctcatctcgccaccttctcaatatatctctaagcaaatcccgaatattaagtccggccattgtaaaaatctgctccagagcgccctccaccttcagcctcaagcagcgaatcatgattgcaaaaattcaggttcctcacagacctgtataagattcaaaagcggaacattaacaaaaataccgcgatcccgtaggtcccttcgcagggccagctgaacataatcgtgcaggtctgcacggaccagcgcggccacttccccgccaggaaccatgacaaaagaacccacactgattatgacacgcatactcggagctatgctaaccagcgtagccccgatgtaagcttgttgcatgggcggcgatataaaatgcaaggtgctgctcaaaaaatcaggcaaagcctcgcgcaaaaaagaaagcacatcgtagtcatgctcatgcagataaaggcaggtaagctccggaaccaccacagaaaaagacaccatttttctctcaaacatgtctgcgggtttctgcataaacacaaaataaaataacaaaaaaacatttaaacattagaagcctgtcttacaacaggaaaaacaacccttataagcataagacggactacggccatgccggcgtgaccgtaaaaaaactggtcaccgtgattaaaaagcaccaccgacagctcctcggtcatgtccggagtcataatgtaagactcggtaaacacatcaggttgattcacatcggtcagtgctaaaaagcgaccgaaatagcccgggggaatacatacccgcaggcgtagagacaacattacagcccccataggaggtataacaaaattaataggagagaaaaacacataaacacctgaaaaaccctcctgcctaggcaaaatagcaccctcccgctccagaacaacatacagcgcttccacagcggcagccataacagtcagccttaccagtaaaaaagaaaacctattaaaaaaacaccactcgacacggcaccagctcaatcagtcacagtgtaaaaaagggccaagtgcagagcgagtatatataggactaaaaaatgacgtaacggttaaagtccacaaaaaacacccagaaaaccgcacgcgaacctacgcccagaaacgaaagccaaaaaacccacaacttcctcaaatcgtcacttccgttttcccacgttacgtcacttcccattttaagaaaactacaattcccaacacatacaagttactccgcccttaattaaatcggatccgatatctagatgtattcgcgaggtaccgagctcgaattctctggccgtcgttttacaacgtcgtgactgggaaaaccctggcgttacccaacttaatcgccttgcagcacatccccctttcgccagctggcgtaatagcgaagaggcccgcaccgatcgcccttcccaacagttgcgcagcctgaatggcgaatggcgcctgatgcggtattttctccttacgcatctgtgcggtatttcacaccgcatatggtgcactctcagtacaatctgctctgatgccgcatagttaagccagccccgacacccgccaacacccgctgacgcgccctgacgggcttgtctgctcccggcatccgcttacagacaagctgtgaccgtctccgggagctgcatgtgtcagaggttttcaccgtcatcaccgaaacgcgcga

SEQ ID NO: 96 - DNA, 11216 bp, Artificial Sequence
  Description of Artificial Sequence: Synthetic polynucleotide
tgcagctctggcccgtgtctcaaaatctctgatgttacattgcacaagataaaaatatatcatcatgaacaataaaactgtctgcttacataaacagtaatacaaggggtgttatgagccatattcaacgggaaacgtcgaggccgcgattaaattccaacatggatgctgatttatatgggtataaatgggctcgcgataatgtcgggcaatcaggtgcgacaatctatcgcttgtatgggaagcccgatgcgccagagttgtttctgaaacatggcaaaggtagcgttgccaatgatgttacagatgagatggtcagactaaactggctgacggaatttatgcctcttccgaccatcaagcattttatccgtactcctgatgatgcatggttactcaccactgcgatccccggaaaaacagcattccaggtattagaagaatatcctgattcaggtgaaaatattgttgatgcgctggcagtgttcctgcgccggttgcattcgattcctgtttgtaattgtccttttaacagcgatcgcgtatttcgtctcgctcaggcgcaatcacgaatgaataacggtttggttgatgcgagtgattttgatgacgagcgtaatggctggcctgttgaacaagtctggaaagaaatgcataaacttttgccattctcaccggattcagtcgtcactcatggtgatttctcacttgataaccttatttttgacgaggggaaattaataggttgtattgatgttggacgagtcggaatcgcagaccgataccaggatcttgccatcctatggaactgcctcggtgagttttctccttcattacagaaacggctttttcaaaaatatggtattgataatcctgatatgaataaattgcagtttcatttgatgctcgatgagtttttctaatcagaattggttaattggttgtaacattattcagattgggcttgatttaaaacttcatttttaatttaaaaggatctaggtgaagatcctttttgataatctcatgaccaaaatcccttaacgtgagttttcgttccactgagcgtcagaccccgtagaaaagatcaaaggatcttcttgagatcctttttttctgcgcgtaatctgctgcttgcaaacaaaaaaaccaccgctaccagcggtggtttgtttgccggatcaagagctaccaactctttttccgaaggtaactggcttcagcagagcgcagataccaaatactgttcttctagtgtagccgtagttaggccaccacttcaagaactctgtagcaccgcctacatacctcgctctgctaatcctgttaccagtggctgctgccagtggcgataagtcgtgtcttaccgggttggactcaagacgatagttaccggataaggcgcagcggtcgggctgaacggggggttcgtgcacacagcccagcttggagcgaacgacctacaccgaactgagatacctacagcgtgagctatgagaaagcgccacgcttcccgaagggagaaaggcggacaggtatccggtaagcggcagggtcggaacaggagagcgcacgagggagcttccagggggaaacgcctggtatctttatagtcctgtcgggtttcgccacctctgacttgagcgtcgatttttgtgatgctcgtcaggggggcggagcctatggaaaaacgccagcaacgcggcctttttacggttcctggccttttgctggccttttgctcacatgttctttcctgcgttatcccctgattctgtggataaccgtattaccgcctttgagtgagctgataccgctcgccgcagccgaacgaccgagcgcagcgagtcagtgagcgaggaagcggaagagcgcccaatacgcaaaccgcctctccccgcgcgttggccgattcattaatgcagctggcacgacaggtttcccgactggaaagcgggcagtgagcgcaacgcaattaatgtgagttagctcactcattaggcaccccaggctttacactttatgcttccggctcgtatgttgtgtggaattgtgagcggataacaatttcacacaggaaacagctatgaccatgattacaccaagcttgcatgcaggcctatccgtagatgtacctggacatccaggtgatgccggcggcggtggtggaggcgcgcggaaagtcgcggacgcggttccagatgttgcgcagcggcaaaaagtgctccatggtcgggacgctctggccggtgaggcgtgcgcagtcgttgacgctctagaccgtgcaaaaggagagcctgtaagcgggcactcttccgtggtctggtggataaattcgcaagggtatcatggcggacgaccggggttcgaaccccggatccggccgtccgccgtgatccatgcggttaccgcccgcgtgtcgaacccaggtgtgcgacgtcagacaacgggggagcgctccttttggcttccttccaggcgcggcggctgctgcgctagcttttttggccactggccgcgcgcggcgtaagcggttaggctggaaagcgaaagcattaagtggctcgctccctgtagccggagggttattttccaagggttgagtcgcaggacccccggttcgagtctcgggccggccggactgcggcgaacgggggtttgcctccccgtcatgcaagaccccgcttgcaaattcctccggaaacagggacgagccccttttttgcttttcccagatgcatccggtgctgcggcagatgcgcccccctcctcagcagcggcaagagcaagagcagcggcagacatgcagggcaccctccccttctcctaccgcgtcaggaggggcaacatcgatccagacatgataagatacattgatgagtttggacaaaccacaactagaatgcagtgaaaaaaatgctttatttgtgaaatttgtgatgctattgctttatttgtaaccattataagctgcaataaacaagtttgtacactctcgggtgattatttacccccacccttgccgtctgcgccgtttaaaaatcaaaggggttctgccgcgcatcgctatgcgccactggcagggacacgttgcgatactggtgtttagtgctccacttaaactcaggcacaaccatccgcggcagctcggtgaagttttcactccacaggctgcgcaccatcaccaacgcgtttagcaggtcgggcgccgatatcttgaagtcgcagttggggcctccgccctgcgcgcgcgagttgcgatacacagggttgcagcactggaacactatcagcgccgggtggtgcacgctggccagcacgctcttgtcggagatcagatccgcgtccaggtcctccgcgttgctcagggcgaacggagtcaactttggtagctgccttcccaaaaagggcgcgtgcccaggctttgagttgcactcgcaccgtagtggcatcaaaaggtgaccgtgcccggtctgggcgttaggatacagcgcctgcataaaagccttgatctgcttaaaagccacctgagcctttgcgccttcagagaagaacatgccgcaagacttgccggaaaactgattggccggacaggccgcgtcgtgcacgcagcaccttgcgtcggtgttggagatctgcaccacatttcggccccaccggttcttcacgatcttggccttgctagactgctccttcagcgcgcgctgcccgttttcgctcgtcacatccatttcaatcacgtgctccttatttatcataatgcttccgtgtagacacttaagctcgccttcgatctcagcgcagcggtgcagccacaacgcgcagcccgtgggctcgtgatgcttgtaggtcacctctgcaaacgactgcaggtacgcctgcaggaatcgccccatcatcgtcacaaaggtcttgttgctggtgaaggtcagctgcaacccgcggtgctcctcgttcagccaggtcttgcatacggccgccagagcttccacttggtcaggcagtagtttgaagttcgcctttagatcgttatccacgtggtacttgtccatcagcgcgcgcgcagcctccatgcccttctcccacgcagacacgatcggcacactcagcgggttcatcaccgtaatttcactttccgcttcgctgggctcttcctcttcctcttgcgtccgcataccacgcgccactgggtcgtcttcattcagccgccgcactgtgcgcttacctcctttgccatgcttgattagcaccggtgggttgctgaaacccaccatttgtagcgccacatcttctctttcttcctcgctgtccacgattacctctggtgatggcgggcgctcgggcttgggagaagggcgcttctttttcttcttgggcgcaatggccaaatccgccgccgaggtcgatggccgcgggctgggtgtgcgcggcaccagcgcgtcttgtgatgagtcttcctcgtcctcggactcgatacgccgcctcatccgcttttttgggggcgcccggggaggcggcggcgacggggacggggacgacacgtcctccatggttgggggacgtcgcgccgcaccgcgtccgcgctcgggggtggtttcgcgctgctcctcttcccgactggccatttccttctcctataggcagaaaaagatcatggagtcagtcgagaagaaggacagcctaaccgccccctctgagttcgccaccaccgcctccaccgatgccgccaacgcgcctaccaccttccccgtcgaggcacccccgcttgaggaggaggaagtgattatcgagcaggacccaggttttgtaagcgaagacgacgaggaccgctcagtaccaacagaggataaaaagcaagaccaggacaacgcagaggcaaacgaggaacaagtcgggcggggggacgaaaggcatggcgactacctagatgtgggagacgacgtgctgttgaagcatctgcagcgccagtgcgccattatctgcgacgcgttgcaagagcgcagcgatgtgcccctcgccatagcggatgtcagccttgcctacgaacgccacctattctcaccgcgcgtaccccccaaacgccaagaaaacggcacatgcgagcccaacccgcgcctcaacttctaccccgtatttgccgtgccagaggtgcttgccacctatcacatctttttccaaaactgcaagatacccctatcctgccgtgccaaccgcagccgagcggacaagcagctggccttgcggcagggcgctgtcatacctgatatcgcctcgctcaacgaagtgccaaaaatctttgagggtcttggacgcgacgagaagcgcgcggcaaacgctctgcaacaggaaaacagcgaaaatgaaagtcactctggagtgttggtggaactcgagggtgacaacgcgcgcctagccgtactaaaacgcagcatcgaggtcacccactttgcctacccggcacttaacctaccccccaaggtcatgagcacagtcatgagtgagctgatcgtgcgccgtgcgcagcccctggagagggatgcaaatttgcaagaacaaacagaggagggcctacccgcagttggcgacgagcagctagcgcgctggcttcaaacgcgcgagcctgccgacttggaggagcgacgcaaactaatgatggccgcagtgctcgttaccgtggagcttgagtgcatgcagcggttctttgctgacccggagatgcagcgcaagctagaggaaacattgcactacacctttcgacagggctacgtacgccaggcctgcaagatctccaacgtggagctctgcaacctggtctcctaccttggaattttgcacgaaaaccgccttgggcaaaacgtgcttcattccacgctcaagggcgaggcgcgccgcgactacgtccgcgactgcgtttacttatttctatgctacacctggcagacggccatgggcgtttggcagcagtgcttggaggagtgcaacctcaaggagctgcagaaactgctaaagcaaaacttgaaggacctatggacggccttcaacgagcgctccgtggccgcgcacctggcggacatcattttccccgaacgcctgcttaaaaccctgcaacagggtctgccagacttcaccagtcaaagcatgttgcagaactttaggaactttatcctagagcgctcaggaatcttgcccgccacctgctgtgcacttcctagcgactttgtgcccattaagtaccgcgaatgccctccgccgctttggggccactgctaccttctgcagctagccaactaccttgcctaccactctgacataatggaagacgtgagcggtgacggtctactggagtgtcactgtcgctgcaacctatgcaccccgcaccgctccctggtttgcaattcgcagctgcttaacgaaagtcaaattatcggtacctttgagctgcagggtccctcgcctgacgaaaagtccgcggctccggggttgaaactcactccggggctgtggacgtcggcttaccttcgcaaatttgtacctgaggactaccacgcccacgagattaggttctacgaagaccaatcccgcccgcctaatgcggagcttaccgcctgcgtcattacccagggccacattcttggccaattgcaagccatcaacaaagcccgccaagagtttctgctacgaaagggacggggggtttacttggacccccagtccggcgaggagctcaacccaatccccccgccgccgcagccctatcagcagcagccgcgggcccttgcttcccaggatggcacccaaaaagaagctgcagctgccgccgccacccacggacgaggaggaatactgggacagtcaggcagaggaggttttggacgaggaggaggaggacatgatggaagactgggagagcctagacgaggaagcttccgaggtcgaagaggtgtcagacgaaacaccgtcaccctcggtcgcattcccctcgccggcgccccagaaatcggcaaccggttccagcatggctacaacctccgctcctcaggcgccgccggcactgcccgttcgccgacccaaccgtagatgggacaccactggaaccagggccggtaagtccaagcagccgccgccgttagcccaagagcaacaacagcgccaaggctaccgctcatggcgcgggcacaagaacgccatagttgcttgcttgcaagactgtgggggcaacatctccttcgcccgccgctttcttctctaccatcacggcgtggccttcccccgtaacatcctgcattactaccgtcatctctacagcccatactgcaccggcggcagcggcagcaacagcagcggccacacagaagcaaaggcgaccggatagcaagactctgacaaagcccaagaaatccacagcggcggcagcagcaggaggaggagcgctgcgtctggcgcccaacgaacccgtatcgacccgcgagcttagaaacaggatttttcccactctgtatgctatatttcaacagagcaggggccaagaacaagagctgaaaataaaaaacaggtctctgcgatccctcacccgcagctgcctgtatcacaaaagcgaagatcagcttcggcgcacgctggaagacgcggaggctctcttcagtaaatactgcgcgctgactcttaaggactagtttcgcgccctttctcaaatttaagcgcgaaaactacgtcatctccagcggccacacccggcgccagcacctgttgtcagcgccattatgagcaaggaaattcccacgccctacatgtggagttaccagccacaaatgggacttgcggctggagctgcccaagactactcaacccgaataaactacatgagcgcggggcggccgcaacttgtttattgcagcttataatggttacaaataaagcaatagcatcacaaatttcacaaataaagcatttttttcactgcattctagttgtggtttgtccaaactcatcaatgtatcttagcttaacgggcggcgaaggagaagtccacgcctacatgggggtagagtcataatcgtgcatcaggatagggcggtggtgctgcagcagcgcgcgaataaactgctgccgccgccgctccgtcctgcaggaatacaacatggcagtggtctcctcagcgatgattcgcaccgcccgcagcataaggcgccttgtcctccgggcacagcagcgcaccctgatctcacttaaatcagcacagtaactgcagcacagcaccacaatattgttcaaaatcccacagtgcaaggcgctgtatccaaagctcatggcggggaccacagaacccacgtggccatcataccacaagcgcaggtagattaagtggcgacccctcataaacacgctggacataaacattacctcttttggcatgttgtaattcaccacctcccggtaccatataaacctctgattaaacatggcgccatccaccaccatcctaaaccagctggccaaaacctgcccgccggctatacactgcagggaaccgggactggaacaatgacagtggagagcccaggactcgtaaccatggatcatcatgctcgtcatgatatcaatgttggcacaacacaggcacacgtgcatacacttcctcaggattacaagctcctcccgcgttagaaccatatcccagggaacaacccattcctgaatcagcgtaaatcccacactgcagggaagacctcgcacgtaactcacgttgtgcattgtcaaagtgttacattcgggcagcagcggatgatcctccagtatggtagcgcgggtttctgtctcaaaaggaggtagacgatccctactgtacggagtgcgccgagacaaccgagatcgtgttggtcgtagtgtcatgccaaatggaacgccggacgtagtcatatttcctgaagcaaaaccaggtgcgggcgtgacaaacagatctgcgtctccggtctcgccgcttagatcgctctgtgtagtagttgtagtatatccactctctcaaagcatccaggcgccccctggcttcgggttctatgtaaactccttcatgcgccgctgccctgataacatccaccaccgcagaataagccacacccagccaacctacacattcgttctgcgagtcacacacgggaggagcgggaagagctggaagaaccatgtttttttttttattccaaaagattatccaaaacctcaaaatgaagatctattaagtgaacgcgctcccctccggtggcgtggtcaaactctacagccaaagaacagataatggcatttgtaagatgttgcacaatggcttccaaaaggcaaacggccctcacgtccaagtggacgtaaaggctaaacccttcagggtgaatctcctctataaacattccagcaccttcaaccatgcccaaataattctcatctcgccaccttctcaatatatctctaagcaaatcccgaatattaagtccggccattgtaaaaatctgctccagagcgccctccaccttcagcctcaagcagcgaatcatgattgcaaaaattcaggttcctcacagacctgtataagattcaaaagcggaacattaacaaaaataccgcgatcccgtaggtcccttcgcagggccagctgaacataatcgtgcaggtctgcacggaccagcgcggccacttccccgccaggaaccatgacaaaagaacccacactgattatgacacgcatactcggagctatgctaaccagcgtagccccgatgtaagcttgttgcatgggcggcgatataaaatgcaaggtgctgctcaaaaaatcaggcaaagcctcgcgcaaaaaagaaagcacatcgtagtcatgctcatgcagataaaggcaggtaagctccggaaccaccacagaaaaagacaccatttttctctcaaacatgtctgcgggtttctgcataaacacaaaataaaataacaaaaaaacatttaaacattagaagcctgtcttacaacaggaaaaacaacccttataagcataagacggactacggccatgccggcgtgaccgtaaaaaaactggtcaccgtgattaaaaagcaccaccgacagctcctcggtcatgtccggagtcataatgtaagactcggtaaacacatcaggttgattcacatcggtcagtgctaaaaagcgaccgaaatagcccgggggaatacatacccgcaggcgtagagacaacattacagcccccataggaggtataacaaaattaataggagagaaaaacacataaacacctgaaaaaccctcctgcctaggcaaaatagcaccctcccgctccagaacaacatacagcgcttccacagcggcagccatggtggcatttgcaaaagcctaggcctccaaaaaagcctcctcactacttctggaatagctcagaggccgaggcggcctcggcctctgcataaataaaaaaaattagtcagccatggggcggagaatgggcggaactgggcggagttaggggcgggatgggcggagttaggggcgggactatggttgctgactaattgagatgcatgctttgcatacttctgcctgctggggagcctggggactttccacacctggttgctgactaattgagatgcatgctttgcatacttctgcctgctggggagcctggggactttccacaccctaactgacacacacgttacgtcacttcccattttaagaaaactacaattcccaacacatacaagttactccgcccttaattaaatcggatccgatatctagatgtattcgcgaggtaccgagctcgaattctctggccgtcgttttacaacgtcgtgactgggaaaaccctggcgttacccaacttaatcgccttgcagcacatccccctttcgccagctggcgtaatagcgaagaggcccgcaccgatcgcccttcccaacagttgcgcagcctgaatggcgaatggcgcctgatgcggtattttctccttacgcatctgtgcggtatttcacaccgcatatggtgcactctcagtacaatctgctctgatgccgcatagttaagccagccccgacacccgccaacacccgctgacgcgccctgacgggcttgtctgctcccggcatccgcttacagacaagctgtgaccgtctccgggagctgcatgtgtcagaggttttcaccgtcatcaccgaaacgcgcga

SEQ ID NO: 97 - DNA, 11883 bp, Artificial Sequence
  Description of Artificial Sequence: Synthetic polynucleotide
tgcagctctggcccgtgtctcaaaatctctgatgttacattgcacaagataaaaatatatcatcatgaacaataaaactgtctgcttacataaacagtaatacaaggggtgttatgagccatattcaacgggaaacgtcgaggccgcgattaaattccaacatggatgctgatttatatgggtataaatgggctcgcgataatgtcgggcaatcaggtgcgacaatctatcgcttgtatgggaagcccgatgcgccagagttgtttctgaaacatggcaaaggtagcgttgccaatgatgttacagatgagatggtcagactaaactggctgacggaatttatgcctcttccgaccatcaagcattttatccgtactcctgatgatgcatggttactcaccactgcgatccccggaaaaacagcattccaggtattagaagaatatcctgattcaggtgaaaatattgttgatgcgctggcagtgttcctgcgccggttgcattcgattcctgtttgtaattgtccttttaacagcgatcgcgtatttcgtctcgctcaggcgcaatcacgaatgaataacggtttggttgatgcgagtgattttgatgacgagcgtaatggctggcctgttgaacaagtctggaaagaaatgcataaacttttgccattctcaccggattcagtcgtcactcatggtgatttctcacttgataaccttatttttgacgaggggaaattaataggttgtattgatgttggacgagtcggaatcgcagaccgataccaggatcttgccatcctatggaactgcctcggtgagttttctccttcattacagaaacggctttttcaaaaatatggtattgataatcctgatatgaataaattgcagtttcatttgatgctcgatgagtttttctaatcagaattggttaattggttgtaacattattcagattgggcttgatttaaaacttcatttttaatttaaaaggatctaggtgaagatcctttttgataatctcatgaccaaaatcccttaacgtgagttttcgttccactgagcgtcagaccccgtagaaaagatcaaaggatcttcttgagatcctttttttctgcgcgtaatctgctgcttgcaaacaaaaaaaccaccgctaccagcggtggtttgtttgccggatcaagagctaccaactctttttccgaaggtaactggcttcagcagagcgcagataccaaatactgttcttctagtgtagccgtagttaggccaccacttcaagaactctgtagcaccgcctacatacctcgctctgctaatcctgttaccagtggctgctgccagtggcgataagtcgtgtcttaccgggttggactcaagacgatagttaccggataaggcgcagcggtcgggctgaacggggggttcgtgcacacagcccagcttggagcgaacgacctacaccgaactgagatacctacagcgtgagctatgagaaagcgccacgcttcccgaagggagaaaggcggacaggtatccggtaagcggcagggtcggaacaggagagcgcacgagggagcttccagggggaaacgcctggtatctttatagtcctgtcgggtttcgccacctctgacttgagcgtcgatttttgtgatgctcgtcaggggggcggagcctatggaaaaacgccagcaacgcggcctttttacggttcctggccttttgctggccttttgctcacatgttctttcctgcgttatcccctgattctgtggataaccgtattaccgcctttgagtgagctgataccgctcgccgcagccgaacgaccgagcgcagcgagtcagtgagcgaggaagcggaagagcgcccaatacgcaaaccgcctctccccgcgcgttggccgattcattaatgcagctggcacgacaggtttcccgactggaaagcgggcagtgagcgcaacgcaattaatgtgagttagctcactcattaggcaccccaggctttacactttatgcttccggctcgtatgttgtgtggaattgtgagcggataacaatttcacacaggaaacagctatgaccatgattacaccaagcttgcatgcaggcctctgcagtcgaccagaagcaccatgtccttgggtccggcctgctgaatgcgcaggcggtcggccatgccccaggcttcgttttgacatcggcgcaggtctttgtagtagtcttgcatgagcctttctaccggcacttcttcttctccttcctcttgtcctgcatctcttgcatctatcgctgcggcggcggcggagtttggccgtaggtggcgccctcttcctcccatgcgtgtgaccccgaagcccctcatcggctgaagcagggctaggtcggcgacaacgcgctcggctaatatggcctgctgcacctgcgtgagggtagactggaagtcatccatgtccacaaagcggtggtatgcgcccgtgttgatggtgtaagtgcagttggccataacggaccagttaacggtctggtgacccggctgcgagagctcggtgtacctgagacgcgagtaagccctcgagtcaaatacgtagtcgttgcaagtccgcaccaggtactggtatcccaccaaaaagtgcggcggcggctggcggtagaggggccagcgtagggtggccggggctccgggggcgagatcttccaacataaggcgatgatatccgtagatgtacctggacatccaggtgatgccggcggcggtggtggaggcgcgcggaaagtcgcggacgcggttccagatgttgcgcagcggcaaaaagtgctccatggtcgggacgctctggccggtcaggcgcgcgcaatcgttgacgctctagcgtgcaaaaggagagcctgtaagcgggcactcttccgtggtctggtggataaattcgcaagggtatcatggcggacgaccggggttcgagccccgtatccggccgtccgccgtgatccatgcggttaccgcccgcgtgtcgaacccaggtgtgcgacgtcagacaacgggggagtgctccttttggcttccttccaggcgcggcggctgctgcgctagcttttttggccactggccgcgcgcagcgtaagcggttaggctggaaagcgaaagcattaagtggctcgctccctgtagccggagggttattttccaagggttgagtcgcgggacccccggttcgagtctcggaccgagactgggggcgtacactggatggcctttgcctggaacccgcactcaaaaacatgctacctctttgagccctttggcttttctgaccagcgactcaagcaggtttaccagtttgagtacgagtcactcctgcgccgtagcgccattgcttcttcccccgaccgctgtataacgctggaaaagtccacccaaagcgtacaggggcccaactcggccgcctgtggactattctgctgcatgtttctccacgcctttgccaactggccccaaactcccatggatcacaaccccaccatgaaccttattaccggggtacccaactccatgctcaacagtccccaggtacagcccaccctgcgtcgcaaccaggaacagctctacagcttcctggagcgccactcgccctacttccgcagccacagtgcgcagattaggagcgccacttctttttgtcacttgaaaaacatgtaaaaataatgtactagagacactttcaataaaggcaaatgcttttatttgtacactctcgggtgattatttacccccacccttgccgtctgcgccgtttaaaaatcaaaggggttctgccgcgcatcgctatgcgccactggcagggacacgttgcgatactggtgtttagtgctccacttaaactcaggcacaaccatccgcggcagctcggtgaagttttcactccacaggctgcgcaccatcaccaacgcgtttagcaggtcgggcgccgatatcttgaagtcgcagttggggcctccgccctgcgcgcgcgagttgcgatacacagggttgcagcactggaacactatcagcgccgggtggtgcacgctggccagcacgctcttgtcggagatcagatccgcgtccaggtcctccgcgttgctcagggcgaacggagtcaactttggtagctgccttcccaaaaagggcgcgtgcccaggctttgagttgcactcgcaccgtagtggcatcaaaaggtgaccgtgcccggtctgggcgttaggatacagcgcctgcataaaagccttgatctgcttaaaagccacctgagcctttgcgccttcagagaagaacatgccgcaagacttgccggaaaactgattggccggacaggccgcgtcgtgcacgcagcaccttgcgtcggtgttggagatctgcaccacatttcggccccaccggttcttcacgatcttggccttgctagactgctccttcagcgcgcgctgcccgttttcgctcgtcacatccatttcaatcacgtgctccttatttatcataatgcttccgtgtagacacttaagctcgccttcgatctcagcgcagcggtgcagccacaacgcgcagcccgtgggctcgtgatgcttgtaggtcacctctgcaaacgactgcaggtacgcctgcaggaatcgccccatcatcgtcacaaaggtcttgttgctggtgaaggtcagctgcaacccgcggtgctcctcgttcagccaggtcttgcatacggccgccagagcttccacttggtcaggcagtagtttgaagttcgcctttagatcgttatccacgtggtacttgtccatcagcgcgcgcgcagcctccatgcccttctcccacgcagacacgatcggcacactcagcgggttcatcaccgtaatttcactttccgcttcgctgggctcttcctcttcctcttgcgtccgcataccacgcgccactgggtcgtcttcattcagccgccgcactgtgcgcttacctcctttgccatgcttgattagcaccggtgggttgctgaaacccaccatttgtagcgccacatcttctctttcttcctcgctgtccacgattacctctggtgatggcgggcgctcgggcttgggagaagggcgcttctttttcttcttgggcgcaatggccaaatccgccgccgaggtcgatggccgcgggctgggtgtgcgcggcaccagcgcgtcttgtgatgagtcttcctcgtcctcggactcgatacgccgcctcatccgcttttttgggggcgcccggggaggcggcggcgacggggacggggacgacacgtcctccatggttgggggacgtcgcgccgcaccgcgtccgcgctcgggggtggtttcgcgctgctcctcttcccgactggccatttccttctcctataggcagaaaaagatcatggagtcagtcgagaagaaggacagcctaaccgccccctctgagttcgccaccaccgcctccaccgatgccgccaacgcgcctaccaccttccccgtcgaggcacccccgcttgaggaggaggaagtgattatcgagcaggacccaggttttgtaagcgaagacgacgaggaccgctcagtaccaacagaggataaaaagcaagaccaggacaacgcagaggcaaacgaggaacaagtcgggcggggggacgaaaggcatggcgactacctagatgtgggagacgacgtgctgttgaagcatctgcagcgccagtgcgccattatctgcgacgcgttgcaagagcgcagcgatgtgcccctcgccatagcggatgtcagccttgcctacgaacgccacctattctcaccgcgcgtaccccccaaacgccaagaaaacggcacatgcgagcccaacccgcgcctcaacttctaccccgtatttgccgtgccagaggtgcttgccacctatcacatctttttccaaaactgcaagatacccctatcctgccgtgccaaccgcagccgagcggacaagcagctggccttgcggcagggcgctgtcatacctgatatcgcctcgctcaacgaagtgccaaaaatctttgagggtcttggacgcgacgagaagcgcgcggcaaacgctctgcaacaggaaaacagcgaaaatgaaagtcactctggagtgttggtggaactcgagggtgacaacgcgcgcctagccgtactaaaacgcagcatcgaggtcacccactttgcctacccggcacttaacctaccccccaaggtcatgagcacagtcatgagtgagctgatcgtgcgccgtgcgcagcccctggagagggatgcaaatttgcaagaacaaacagaggagggcctacccgcagttggcgacgagcagctagcgcgctggcttcaaacgcgcgagcctgccgacttggaggagcgacgcaaactaatgatggccgcagtgctcgttaccgtggagcttgagtgcatgcagcggttctttgctgacccggagatgcagcgcaagctagaggaaacattgcactacacctttcgacagggctacgtacgccaggcctgcaagatctccaacgtggagctctgcaacctggtctcctaccttggaattttgcacgaaaaccgccttgggcaaaacgtgcttcattccacgctcaagggcgaggcgcgccgcgactacgtccgcgactgcgtttacttatttctatgctacacctggcagacggccatgggcgtttggcagcagtgcttggaggagtgcaacctcaaggagctgcagaaactgctaaagcaaaacttgaaggacctatggacggccttcaacgagcgctccgtggccgcgcacctggcggacatcattttccccgaacgcctgcttaaaaccctgcaacagggtctgccagacttcaccagtcaaagcatgttgcagaactttaggaactttatcctagagcgctcaggaatcttgcccgccacctgctgtgcacttcctagcgactttgtgcccattaagtaccgcgaatgccctccgccgctttggggccactgctaccttctgcagctagccaactaccttgcctaccactctgacataatggaagacgtgagcggtgacggtctactggagtgtcactgtcgctgcaacctatgcaccccgcaccgctccctggtttgcaattcgcagctgcttaacgaaagtcaaattatcggtacctttgagctgcagggtccctcgcctgacgaaaagtccgcggctccggggttgaaactcactccggggctgtggacgtcggcttaccttcgcaaatttgtacctgaggactaccacgcccacgagattaggttctacgaagaccaatcccgcccgcctaatgcggagcttaccgcctgcgtcattacccagggccacattcttggccaattgcaagccatcaacaaagcccgccaagagtttctgctacgaaagggacggggggtttacttggacccccagtccggcgaggagctcaacccaatccccccgccgccgcagccctatcagcagcagccgcgggcccttgcttcccaggatggcacccaaaaagaagctgcagctgccgccgccacccacggacgaggaggaatactgggacagtcaggcagaggaggttttggacgaggaggaggaggacatgatggaagactgggagagcctagacgaggaagcttccgaggtcgaagaggtgtcagacgaaacaccgtcaccctcggtcgcattcccctcgccggcgccccagaaatcggcaaccggttccagcatggctacaacctccgctcctcaggcgccgccggcactgcccgttcgccgacccaaccgtagatgggacaccactggaaccagggccggtaagtccaagcagccgccgccgttagcccaagagcaacaacagcgccaaggctaccgctcatggcgcgggcacaagaacgccatagttgcttgcttgcaagactgtgggggcaacatctccttcgcccgccgctttcttctctaccatcacggcgtggccttcccccgtaacatcctgcattactaccgtcatctctacagcccatactgcaccggcggcagcggcagcaacagcagcggccacacagaagcaaaggcgaccggatagcaagactctgacaaagcccaagaaatccacagcggcggcagcagcaggaggaggagcgctgcgtctggcgcccaacgaacccgtatcgacccgcgagcttagaaacaggatttttcccactctgtatgctatatttcaacagagcaggggccaagaacaagagctgaaaataaaaaacaggtctctgcgatccctcacccgcagctgcctgtatcacaaaagcgaagatcagcttcggcgcacgctggaagacgcggaggctctcttcagtaaatactgcgcgctgactcttaaggactagtttcgcgccctttctcaaatttaagcgcgaaaactacgtcatctccagcggccacacccggcgccagcacctgttgtcagcgccattatgagcaaggaaattcccacgccctacatgtggagttaccagccacaaatgggacttgcggctggagctgcccaagactactcaacccgaataaactacatgagcgcggggcggccgcaacttgtttattgcagcttataatggttacaaataaagcaatagcatcacaaatttcacaaataaagcatttttttcactgcattctagttgtggtttgtccaaactcatcaatgtatcttagcttaacgggcggcgaaggagaagtccacgcctacatgggggtagagtcataatcgtgcatcaggatagggcggtggtgctgcagcagcgcgcgaataaactgctgccgccgccgctccgtcctgcaggaatacaacatggcagtggtctcctcagcgatgattcgcaccgcccgcagcataaggcgccttgtcctccgggcacagcagcgcaccctgatctcacttaaatcagcacagtaactgcagcacagcaccacaatattgttcaaaatcccacagtgcaaggcgctgtatccaaagctcatggcggggaccacagaacccacgtggccatcataccacaagcgcaggtagattaagtggcgacccctcataaacacgctggacataaacattacctcttttggcatgttgtaattcaccacctcccggtaccatataaacctctgattaaacatggcgccatccaccaccatcctaaaccagctggccaaaacctgcccgccggctatacactgcagggaaccgggactggaacaatgacagtggagagcccaggactcgtaaccatggatcatcatgctcgtcatgatatcaatgttggcacaacacaggcacacgtgcatacacttcctcaggattacaagctcctcccgcgttagaaccatatcccagggaacaacccattcctgaatcagcgtaaatcccacactgcagggaagacctcgcacgtaactcacgttgtgcattgtcaaagtgttacattcgggcagcagcggatgatcctccagtatggtagcgcgggtttctgtctcaaaaggaggtagacgatccctactgtacggagtgcgccgagacaaccgagatcgtgttggtcgtagtgtcatgccaaatggaacgccggacgtagtcatatttcctgaagcaaaaccaggtgcgggcgtgacaaacagatctgcgtctccggtctcgccgcttagatcgctctgtgtagtagttgtagtatatccactctctcaaagcatccaggcgccccctggcttcgggttctatgtaaactccttcatgcgccgctgccctgataacatccaccaccgcagaataagccacacccagccaacctacacattcgttctgcgagtcacacacgggaggagcgggaagagctggaagaaccatgtttttttttttattccaaaagattatccaaaacctcaaaatgaagatctattaagtgaacgcgctcccctccggtggcgtggtcaaactctacagccaaagaacagataatggcatttgtaagatgttgcacaatggcttccaaaaggcaaacggccctcacgtccaagtggacgtaaaggctaaacccttcagggtgaatctcctctataaacattccagcaccttcaaccatgcccaaataattctcatctcgccaccttctcaatatatctctaagcaaatcccgaatattaagtccggccattgtaaaaatctgctccagagcgccctccaccttcagcctcaagcagcgaatcatgattgcaaaaattcaggttcctcacagacctgtataagattcaaaagcggaacattaacaaaaataccgcgatcccgtaggtcccttcgcagggccagctgaacataatcgtgcaggtctgcacggaccagcgcggccacttccccgccaggaaccatgacaaaagaacccacactgattatgacacgcatactcggagctatgctaaccagcgtagccccgatgtaagcttgttgcatgggcggcgatataaaatgcaaggtgctgctcaaaaaatcaggcaaagcctcgcgcaaaaaagaaagcacatcgtagtcatgctcatgcagataaaggcaggtaagctccggaaccaccacagaaaaagacaccatttttctctcaaacatgtctgcgggtttctgcataaacacaaaataaaataacaaaaaaacatttaaacattagaagcctgtcttacaacaggaaaaacaacccttataagcataagacggactacggccatgccggcgtgaccgtaaaaaaactggtcaccgtgattaaaaagcaccaccgacagctcctcggtcatgtccggagtcataatgtaagactcggtaaacacatcaggttgattcacatcggtcagtgctaaaaagcgaccgaaatagcccgggggaatacatacccgcaggcgtagagacaacattacagcccccataggaggtataacaaaattaataggagagaaaaacacataaacacctgaaaaaccctcctgcctaggcaaaatagcaccctcccgctccagaacaacatacagcgcttccacagcggcagccataacagtcagccttaccagtaaaaaagaaaacctattaaaaaaacaccactcgacacggcaccagctcaatcagtcacagtgtaaaaaagggccaagtgcagagcgagtatatataggactaaaaaatgacgtaacggttaaagtccacaaaaaacacccagaaaaccgcacgcgaacctacgcccagaaacgaaagccaaaaaacccacaacttcctcaaatcgtcacttccgttttcccacgttacgtcacttcccattttaagaaaactacaattcccaacacatacaagttactccgcccttaattaaatcggatccgatatctagatgtattcgcgaggtaccgagctcgaattctctggccgtcgttttacaacgtcgtgactgggaaaaccctggcgttacccaacttaatcgccttgcagcacatccccctttcgccagctggcgtaatagcgaagaggcccgcaccgatcgcccttcccaacagttgcgcagcctgaatggcgaatggcgcctgatgcggtattttctccttacgcatctgtgcggtatttcacaccgcatatggtgcactctcagtacaatctgctctgatgccgcatagttaagccagccccgacacccgccaacacccgctgacgcgccctgacgggcttgtctgctcccggcatccgcttacagacaagctgtgaccgtctccgggagctgcatgtgtcagaggttttcaccgtcatcaccgaaacgcgcga

SEQ ID NO: 98 - DNA, 11980 bp, Artificial Sequence
  Description of Artificial Sequence: Synthetic polynucleotide
tgcagctctggcccgtgtctcaaaatctctgatgttacattgcacaagataaaaatatatcatcatgaacaataaaactgtctgcttacataaacagtaatacaaggggtgttatgagccatattcaacgggaaacgtcgaggccgcgattaaattccaacatggatgctgatttatatgggtataaatgggctcgcgataatgtcgggcaatcaggtgcgacaatctatcgcttgtatgggaagcccgatgcgccagagttgtttctgaaacatggcaaaggtagcgttgccaatgatgttacagatgagatggtcagactaaactggctgacggaatttatgcctcttccgaccatcaagcattttatccgtactcctgatgatgcatggttactcaccactgcgatccccggaaaaacagcattccaggtattagaagaatatcctgattcaggtgaaaatattgttgatgcgctggcagtgttcctgcgccggttgcattcgattcctgtttgtaattgtccttttaacagcgatcgcgtatttcgtctcgctcaggcgcaatcacgaatgaataacggtttggttgatgcgagtgattttgatgacgagcgtaatggctggcctgttgaacaagtctggaaagaaatgcataaacttttgccattctcaccggattcagtcgtcactcatggtgatttctcacttgataaccttatttttgacgaggggaaattaataggttgtattgatgttggacgagtcggaatcgcagaccgataccaggatcttgccatcctatggaactgcctcggtgagttttctccttcattacagaaacggctttttcaaaaatatggtattgataatcctgatatgaataaattgcagtttcatttgatgctcgatgagtttttctaatcagaattggttaattggttgtaacattattcagattgggcttgatttaaaacttcatttttaatttaaaaggatctaggtgaagatcctttttgataatctcatgaccaaaatcccttaacgtgagttttcgttccactgagcgtcagaccccgtagaaaagatcaaaggatcttcttgagatcctttttttctgcgcgtaatctgctgcttgcaaacaaaaaaaccaccgctaccagcggtggtttgtttgccggatcaagagctaccaactctttttccgaaggtaactggcttcagcagagcgcagataccaaatactgttcttctagtgtagccgtagttaggccaccacttcaagaactctgtagcaccgcctacatacctcgctctgctaatcctgttaccagtggctgctgccagtggcgataagtcgtgtcttaccgggttggactcaagacgatagttaccggataaggcgcagcggtcgggctgaacggggggttcgtgcacacagcccagcttggagcgaacgacctacaccgaactgagatacctacagcgtgagctatgagaaagcgccacgcttcccgaagggagaaaggcggacaggtatccggtaagcggcagggtcggaacaggagagcgcacgagggagcttccagggggaaacgcctggtatctttatagtcctgtcgggtttcgccacctctgacttgagcgtcgatttttgtgatgctcgtcaggggggcggagcctatggaaaaacgccagcaacgcggcctttttacggttcctggccttttgctggccttttgctcacatgttctttcctgcgttatcccctgattctgtggataaccgtattaccgcctttgagtgagctgataccgctcgccgcagccgaacgaccgagcgcagcgagtcagtgagcgaggaagcggaagagcgcccaatacgcaaaccgcctctccccgcgcgttggccgattcattaatgcagctggcacgacaggtttcccgactggaaagcgggcagtgagcgcaacgcaattaatgtgagttagctcactcattaggcaccccaggctttacactttatgcttccggctcgtatgttgtgtggaattgtgagcggataacaatttcacacaggaaacagctatgaccatgattacaccaagcttgcatgcaggcctctgcagtcgaccagaagcaccatgtccttgggtccggcctgctgaatgcgcaggcggtcggccatgccccaggcttcgttttgacatcggcgcaggtctttgtagtagtcttgcatgagcctttctaccggcacttcttcttctccttcctcttgtcctgcatctcttgcatctatcgctgcggcggcggcggagtttggccgtaggtggcgccctcttcctcccatgcgtgtgaccccgaagcccctcatcggctgaagcagggctaggtcggcgacaacgcgctcggctaatatggcctgctgcacctgcgtgagggtagactggaagtcatccatgtccacaaagcggtggtatgcgcccgtgttgatggtgtaagtgcagttggccataacggaccagttaacggtctggtgacccggctgcgagagctcggtgtacctgagacgcgagtaagccctcgagtcaaatacgtagtcgttgcaagtccgcaccaggtactggtatcccaccaaaaagtgcggcggcggctggcggtagaggggccagcgtagggtggccggggctccgggggcgagatcttccaacataaggcgatgatatccgtagatgtacctggacatccaggtgatgccggcggcggtggtggaggcgcgcggaaagtcgcggacgcggttccagatgttgcgcagcggcaaaaagtgctccatggtcgggacgctctggccggtcaggcgcgcgcaatcgttgacgctctagcgtgcaaaaggagagcctgtaagcgggcactcttccgtggtctggtggataaattcgcaagggtatcatggcggacgaccggggttcgagccccgtatccggccgtccgccgtgatccatgcggttaccgcccgcgtgtcgaacccaggtgtgcgacgtcagacaacgggggagtgctccttttggcttccttccaggcgcggcggctgctgcgctagcttttttggccactggccgcgcgcagcgtaagcggttaggctggaaagcgaaagcattaagtggctcgctccctgtagccggagggttattttccaagggttgagtcgcgggacccccggttcgagtctcggaccgagactgggggcgtacactggatggcctttgcctggaacccgcactcaaaaacatgctacctctttgagccctttggcttttctgaccagcgactcaagcaggtttaccagtttgagtacgagtcactcctgcgccgtagcgccattgcttcttcccccgaccgctgtataacgctggaaaagtccacccaaagcgtacaggggcccaactcggccgcctgtggactattctgctgcatgtttctccacgcctttgccaactggccccaaactcccatggatcacaaccccaccatgaaccttattaccggggtacccaactccatgctcaacagtccccaggtacagcccaccctgcgtcgcaaccaggaacagctctacagcttcctggagcgccactcgccctacttccgcagccacagtgcgcagattaggagcgccacttctttttgtcacttgaaaaacatgtaaaaataatgtactagagacactttcaataaaggcaaatgcttttatttgtacactctcgggtgattatttacccccacccttgccgtctgcgccgtttaaaaatcaaaggggttctgccgcgcatcgctatgcgccactggcagggacacgttgcgatactggtgtttagtgctccacttaaactcaggcacaaccatccgcggcagctcggtgaagttttcactccacaggctgcgcaccatcaccaacgcgtttagcaggtcgggcgccgatatcttgaagtcgcagttggggcctccgccctgcgcgcgcgagttgcgatacacagggttgcagcactggaacactatcagcgccgggtggtgcacgctggccagcacgctcttgtcggagatcagatccgcgtccaggtcctccgcgttgctcagggcgaacggagtcaactttggtagctgccttcccaaaaagggcgcgtgcccaggctttgagttgcactcgcaccgtagtggcatcaaaaggtgaccgtgcccggtctgggcgttaggatacagcgcctgcataaaagccttgatctgcttaaaagccacctgagcctttgcgccttcagagaagaacatgccgcaagacttgccggaaaactgattggccggacaggccgcgtcgtgcacgcagcaccttgcgtcggtgttggagatctgcaccacatttcggccccaccggttcttcacgatcttggccttgctagactgctccttcagcgcgcgctgcccgttttcgctcgtcacatccatttcaatcacgtgctccttatttatcataatgcttccgtgtagacacttaagctcgccttcgatctcagcgcagcggtgcagccacaacgcgcagcccgtgggctcgtgatgcttgtaggtcacctctgcaaacgactgcaggtacgcctgcaggaatcgccccatcatcgtcacaaaggtcttgttgctggtgaaggtcagctgcaacccgcggtgctcctcgttcagccaggtcttgcatacggccgccagagcttccacttggtcaggcagtagtttgaagttcgcctttagatcgttatccacgtggtacttgtccatcagcgcgcgcgcagcctccatgcccttctcccacgcagacacgatcggcacactcagcgggttcatcaccgtaatttcactttccgcttcgctgggctcttcctcttcctcttgcgtccgcataccacgcgccactgggtcgtcttcattcagccgccgcactgtgcgcttacctcctttgccatgcttgattagcaccggtgggttgctgaaacccaccatttgtagcgccacatcttctctttcttcctcgctgtccacgattacctctggtgatggcgggcgctcgggcttgggagaagggcgcttctttttcttcttgggcgcaatggccaaatccgccgccgaggtcgatggccgcgggctgggtgtgcgcggcaccagcgcgtcttgtgatgagtcttcctcgtcctcggactcgatacgccgcctcatccgcttttttgggggcgcccggggaggcggcggcgacggggacggggacgacacgtcctccatggttgggggacgtcgcgccgcaccgcgtccgcgctcgggggtggtttcgcgctgctcctcttcccgactggccatttccttctcctataggcagaaaaagatcatggagtcagtcgagaagaaggacagcctaaccgccccctctgagttcgccaccaccgcctccaccgatgccgccaacgcgcctaccaccttccccgtcgaggcacccccgcttgaggaggaggaagtgattatcgagcaggacccaggttttgtaagcgaagacgacgaggaccgctcagtaccaacagaggataaaaagcaagaccaggacaacgcagaggcaaacgaggaacaagtcgggcggggggacgaaaggcatggcgactacctagatgtgggagacgacgtgctgttgaagcatctgcagcgccagtgcgccattatctgcgacgcgttgcaagagcgcagcgatgtgcccctcgccatagcggatgtcagccttgcctacgaacgccacctattctcaccgcgcgtaccccccaaacgccaagaaaacggcacatgcgagcccaacccgcgcctcaacttctaccccgtatttgccgtgccagaggtgcttgccacctatcacatctttttccaaaactgcaagatacccctatcctgccgtgccaaccgcagccgagcggacaagcagctggccttgcggcagggcgctgtcatacctgatatcgcctcgctcaacgaagtgccaaaaatctttgagggtcttggacgcgacgagaagcgcgcggcaaacgctctgcaacaggaaaacagcgaaaatgaaagtcactctggagtgttggtggaactcgagggtgacaacgcgcgcctagccgtactaaaacgcagcatcgaggtcacccactttgcctacccggcacttaacctaccccccaaggtcatgagcacagtcatgagtgagctgatcgtgcgccgtgcgcagcccctggagagggatgcaaatttgcaagaacaaacagaggagggcctacccgcagttggcgacgagcagctagcgcgctggcttcaaacgcgcgagcctgccgacttggaggagcgacgcaaactaatgatggccgcagtgctcgttaccgtggagcttgagtgcatgcagcggttctttgctgacccggagatgcagcgcaagctagaggaaacattgcactacacctttcgacagggctacgtacgccaggcctgcaagatctccaacgtggagctctgcaacctggtctcctaccttggaattttgcacgaaaaccgccttgggcaaaacgtgcttcattccacgctcaagggcgaggcgcgccgcgactacgtccgcgactgcgtttacttatttctatgctacacctggcagacggccatgggcgtttggcagcagtgcttggaggagtgcaacctcaaggagctgcagaaactgctaaagcaaaacttgaaggacctatggacggccttcaacgagcgctccgtggccgcgcacctggcggacatcattttccccgaacgcctgcttaaaaccctgcaacagggtctgccagacttcaccagtcaaagcatgttgcagaactttaggaactttatcctagagcgctcaggaatcttgcccgccacctgctgtgcacttcctagcgactttgtgcccattaagtaccgcgaatgccctccgccgctttggggccactgctaccttctgcagctagccaactaccttgcctaccactctgacataatggaagacgtgagcggtgacggtctactggagtgtcactgtcgctgcaacctatgcaccccgcaccgctccctggtttgcaattcgcagctgcttaacgaaagtcaaattatcggtacctttgagctgcagggtccctcgcctgacgaaaagtccgcggctccggggttgaaactcactccggggctgtggacgtcggcttaccttcgcaaatttgtacctgaggactaccacgcccacgagattaggttctacgaagaccaatcccgcccgcctaatgcggagcttaccgcctgcgtcattacccagggccacattcttggccaattgcaagccatcaacaaagcccgccaagagtttctgctacgaaagggacggggggtttacttggacccccagtccggcgaggagctcaacccaatccccccgccgccgcagccctatcagcagcagccgcgggcccttgcttcccaggatggcacccaaaaagaagctgcagctgccgccgccacccacggacgaggaggaatactgggacagtcaggcagaggaggttttggacgaggaggaggaggacatgatggaagactgggagagcctagacgaggaagcttccgaggtcgaagaggtgtcagacgaaacaccgtcaccctcggtcgcattcccctcgccggcgccccagaaatcggcaaccggttccagcatggctacaacctccgctcctcaggcgccgccggcactgcccgttcgccgacccaaccgtagatgggacaccactggaaccagggccggtaagtccaagcagccgccgccgttagcccaagagcaacaacagcgccaaggctaccgctcatggcgcgggcacaagaacgccatagttgcttgcttgcaagactgtgggggcaacatctccttcgcccgccgctttcttctctaccatcacggcgtggccttcccccgtaacatcctgcattactaccgtcatctctacagcccatactgcaccggcggcagcggcagcaacagcagcggccacacagaagcaaaggcgaccggatagcaagactctgacaaagcccaagaaatccacagcggcggcagcagcaggaggaggagcgctgcgtctggcgcccaacgaacccgtatcgacccgcgagcttagaaacaggatttttcccactctgtatgctatatttcaacagagcaggggccaagaacaagagctgaaaataaaaaacaggtctctgcgatccctcacccgcagctgcctgtatcacaaaagcgaagatcagcttcggcgcacgctggaagacgcggaggctctcttcagtaaatactgcgcgctgactcttaaggactagtttcgcgccctttctcaaatttaagcgcgaaaactacgtcatctccagcggccacacccggcgccagcacctgttgtcagcgccattatgagcaaggaaattcccacgccctacatgtggagttaccagccacaaatgggacttgcggctggagctgcccaagactactcaacccgaataaactacatgagcgcggggcggccgcaacttgtttattgcagcttataatggttacaaataaagcaatagcatcacaaatttcacaaataaagcatttttttcactgcattctagttgtggtttgtccaaactcatcaatgtatcttagcttaacgggcggcgaaggagaagtccacgcctacatgggggtagagtcataatcgtgcatcaggatagggcggtggtgctgcagcagcgcgcgaataaactgctgccgccgccgctccgtcctgcaggaatacaacatggcagtggtctcctcagcgatgattcgcaccgcccgcagcataaggcgccttgtcctccgggcacagcagcgcaccctgatctcacttaaatcagcacagtaactgcagcacagcaccacaatattgttcaaaatcccacagtgcaaggcgctgtatccaaagctcatggcggggaccacagaacccacgtggccatcataccacaagcgcaggtagattaagtggcgacccctcataaacacgctggacataaacattacctcttttggcatgttgtaattcaccacctcccggtaccatataaacctctgattaaacatggcgccatccaccaccatcctaaaccagctggccaaaacctgcccgccggctatacactgcagggaaccgggactggaacaatgacagtggagagcccaggactcgtaaccatggatcatcatgctcgtcatgatatcaatgttggcacaacacaggcacacgtgcatacacttcctcaggattacaagctcctcccgcgttagaaccatatcccagggaacaacccattcctgaatcagcgtaaatcccacactgcagggaagacctcgcacgtaactcacgttgtgcattgtcaaagtgttacattcgggcagcagcggatgatcctccagtatggtagcgcgggtttctgtctcaaaaggaggtagacgatccctactgtacggagtgcgccgagacaaccgagatcgtgttggtcgtagtgtcatgccaaatggaacgccggacgtagtcatatttcctgaagcaaaaccaggtgcgggcgtgacaaacagatctgcgtctccggtctcgccgcttagatcgctctgtgtagtagttgtagtatatccactctctcaaagcatccaggcgccccctggcttcgggttctatgtaaactccttcatgcgccgctgccctgataacatccaccaccgcagaataagccacacccagccaacctacacattcgttctgcgagtcacacacgggaggagcgggaagagctggaagaaccatgtttttttttttattccaaaagattatccaaaacctcaaaatgaagatctattaagtgaacgcgctcccctccggtggcgtggtcaaactctacagccaaagaacagataatggcatttgtaagatgttgcacaatggcttccaaaaggcaaacggccctcacgtccaagtggacgtaaaggctaaacccttcagggtgaatctcctctataaacattccagcaccttcaaccatgcccaaataattctcatctcgccaccttctcaatatatctctaagcaaatcccgaatattaagtccggccattgtaaaaatctgctccagagcgccctccaccttcagcctcaagcagcgaatcatgattgcaaaaattcaggttcctcacagacctgtataagattcaaaagcggaacattaacaaaaataccgcgatcccgtaggtcccttcgcagggccagctgaacataatcgtgcaggtctgcacggaccagcgcggccacttccccgccaggaaccatgacaaaagaacccacactgattatgacacgcatactcggagctatgctaaccagcgtagccccgatgtaagcttgttgcatgggcggcgatataaaatgcaaggtgctgctcaaaaaatcaggcaaagcctcgcgcaaaaaagaaagcacatcgtagtcatgctcatgcagataaaggcaggtaagctccggaaccaccacagaaaaagacaccatttttctctcaaacatgtctgcgggtttctgcataaacacaaaataaaataacaaaaaaacatttaaacattagaagcctgtcttacaacaggaaaaacaacccttataagcataagacggactacggccatgccggcgtgaccgtaaaaaaactggtcaccgtgattaaaaagcaccaccgacagctcctcggtcatgtccggagtcataatgtaagactcggtaaacacatcaggttgattcacatcggtcagtgctaaaaagcgaccgaaatagcccgggggaatacatacccgcaggcgtagagacaacattacagcccccataggaggtataacaaaattaataggagagaaaaacacataaacacctgaaaaaccctcctgcctaggcaaaatagcaccctcccgctccagaacaacatacagcgcttccacagcggcagccatggtggcatttgcaaaagcctaggcctccaaaaaagcctcctcactacttctggaatagctcagaggccgaggcggcctcggcctctgcataaataaaaaaaattagtcagccatggggcggagaatgggcggaactgggcggagttaggggcgggatgggcggagttaggggcgggactatggttgctgactaattgagatgcatgctttgcatacttctgcctgctggggagcctggggactttccacacctggttgctgactaattgagatgcatgctttgcatacttctgcctgctggggagcctggggactttccacaccctaactgacacacacgttacgtcacttcccattttaagaaaactacaattcccaacacatacaagttactccgcccttaattaaatcggatccgatatctagatgtattcgcgaggtaccgagctcgaattctctggccgtcgttttacaacgtcgtgactgggaaaaccctggcgttacccaacttaatcgccttgcagcacatccccctttcgccagctggcgtaatagcgaagaggcccgcaccgatcgcccttcccaacagttgcgcagcctgaatggcgaatggcgcctgatgcggtattttctccttacgcatctgtgcggtatttcacaccgcatatggtgcactctcagtacaatctgctctgatgccgcatagttaagccagccccgacacccgccaacacccgctgacgcgccctgacgggcttgtctgctcccggcatccgcttacagacaagctgtgaccgtctccgggagctgcatgtgtcagaggttttcaccgtcatcaccgaaacgcgcga

SEQ ID NO: 99 - DNA, 17250 bp, Artificial Sequence
  Description of Artificial Sequence: Synthetic polynucleotide
tgcagctctggcccgtgtctcaaaatctctgatgttacattgcacaagataaaaatatatcatcatgaacaataaaactgtctgcttacataaacagtaatacaaggggtgttatgagccatattcaacgggaaacgtcgaggccgcgattaaattccaacatggatgctgatttatatgggtataaatgggctcgcgataatgtcgggcaatcaggtgcgacaatctatcgcttgtatgggaagcccgatgcgccagagttgtttctgaaacatggcaaaggtagcgttgccaatgatgttacagatgagatggtcagactaaactggctgacggaatttatgcctcttccgaccatcaagcattttatccgtactcctgatgatgcatggttactcaccactgcgatccccggaaaaacagcattccaggtattagaagaatatcctgattcaggtgaaaatattgttgatgcgctggcagtgttcctgcgccggttgcattcgattcctgtttgtaattgtccttttaacagcgatcgcgtatttcgtctcgctcaggcgcaatcacgaatgaataacggtttggttgatgcgagtgattttgatgacgagcgtaatggctggcctgttgaacaagtctggaaagaaatgcataaacttttgccattctcaccggattcagtcgtcactcatggtgatttctcacttgataaccttatttttgacgaggggaaattaataggttgtattgatgttggacgagtcggaatcgcagaccgataccaggatcttgccatcctatggaactgcctcggtgagttttctccttcattacagaaacggctttttcaaaaatatggtattgataatcctgatatgaataaattgcagtttcatttgatgctcgatgagtttttctaatcagaattggttaattggttgtaacattattcagattgggcttgatttaaaacttcatttttaatttaaaaggatctaggtgaagatcctttttgataatctcatgaccaaaatcccttaacgtgagttttcgttccactgagcgtcagaccccgtagaaaagatcaaaggatcttcttgagatcctttttttctgcgcgtaatctgctgcttgcaaacaaaaaaaccaccgctaccagcggtggtttgtttgccggatcaagagctaccaactctttttccgaaggtaactggcttcagcagagcgcagataccaaatactgttcttctagtgtagccgtagttaggccaccacttcaagaactctgtagcaccgcctacatacctcgctctgctaatcctgttaccagtggctgctgccagtggcgataagtcgtgtcttaccgggttggactcaagacgatagttaccggataaggcgcagcggtcgggctgaacggggggttcgtgcacacagcccagcttggagcgaacgacctacaccgaactgagatacctacagcgtgagctatgagaaagcgccacgcttcccgaagggagaaaggcggacaggtatccggtaagcggcagggtcggaacaggagagcgcacgagggagcttccagggggaaacgcctggtatctttatagtcctgtcgggtttcgccacctctgacttgagcgtcgatttttgtgatgctcgtcaggggggcggagcctatggaaaaacgccagcaacgcggcctttttacggttcctggccttttgctggccttttgctcacatgttctttcctgcgttatcccctgattctgtggataaccgtattaccgcctttgagtgagctgataccgctcgccgcagccgaacgaccgagcgcagcgagtcagtgagcgaggaagcggaagagcgcccaatacgcaaaccgcctctccccgcgcgttggccgattcattaatgcagctggcacgacaggtttcccgactggaaagcgggcagtgagcgcaacgcaattaatgtgagttagctcactcattaggcaccccaggctttacactttatgcttccggctcgtatgttgtgtggaattgtgagcggataacaatttcacacaggaaacagctatgaccatgattacaccaagcttgcatgcaggcctatccgtagatgtacctggacatccaggtgatgccggcggcggtggtggaggcgcgcggaaagtcgcggacgcggttccagatgttgcgcagcggcaaaaagtgctccatggtcgggacgctctggccggtgaggcgtgcgcagtcgttgacgctctagaccgtgcaaaaggagagcctgtaagcgggcactcttccgtggtctggtggataaattcgcaagggtatcatggcggacgaccggggttcgaaccccggatccggccgtccgccgtgatccatgcggttaccgcccgcgtgtcgaacccaggtgtgcgacgtcagacaacgggggagcgctccttttggcttccttccaggcgcggcggctgctgcgctagcttttttggccactggccgcgcgcggcgtaagcggttaggctggaaagcgaaagcattaagtggctcgctccctgtagccggagggttattttccaagggttgagtcgcaggacccccggttcgagtctcgggccggccggactgcggcgaacgggggtttgcctccccgtcatgcaagaccccgcttgcaaattcctccggaaacagggacgagccccttttttgcttttcccagatgcatccggtgctgcggcagatgcgcccccctcctcagcagcggcaagagcaagagcagcggcagacatgcagggcaccctccccttctcctaccgcgtcaggaggggcaacatcgatccagacatgataagatacattgatgagtttggacaaaccacaactagaatgcagtgaaaaaaatgctttatttgtgaaatttgtgatgctattgctttatttgtaaccattataagctgcaataaacaagtttgtacactctcgggtgattatttacccccacccttgccgtctgcgccgtttaaaaatcaaaggggttctgccgcgcatcgctatgcgccactggcagggacacgttgcgatactggtgtttagtgctccacttaaactcaggcacaaccatccgcggcagctcggtgaagttttcactccacaggctgcgcaccatcaccaacgcgtttagcaggtcgggcgccgatatcttgaagtcgcagttggggcctccgccctgcgcgcgcgagttgcgatacacagggttgcagcactggaacactatcagcgccgggtggtgcacgctggccagcacgctcttgtcggagatcagatccgcgtccaggtcctccgcgttgctcagggcgaacggagtcaactttggtagctgccttcccaaaaagggcgcgtgcccaggctttgagttgcactcgcaccgtagtggcatcaaaaggtgaccgtgcccggtctgggcgttaggatacagcgcctgcataaaagccttgatctgcttaaaagccacctgagcctttgcgccttcagagaagaacatgccgcaagacttgccggaaaactgattggccggacaggccgcgtcgtgcacgcagcaccttgcgtcggtgttggagatctgcaccacatttcggccccaccggttcttcacgatcttggccttgctagactgctccttcagcgcgcgctgcccgttttcgctcgtcacatccatttcaatcacgtgctccttatttatcataatgcttccgtgtagacacttaagctcgccttcgatctcagcgcagcggtgcagccacaacgcgcagcccgtgggctcgtgatgcttgtaggtcacctctgcaaacgactgcaggtacgcctgcaggaatcgccccatcatcgtcacaaaggtcttgttgctggtgaaggtcagctgcaacccgcggtgctcctcgttcagccaggtcttgcatacggccgccagagcttccacttggtcaggcagtagtttgaagttcgcctttagatcgttatccacgtggtacttgtccatcagcgcgcgcgcagcctccatgcccttctcccacgcagacacgatcggcacactcagcgggttcatcaccgtaatttcactttccgcttcgctgggctcttcctcttcctcttgcgtccgcataccacgcgccactgggtcgtcttcattcagccgccgcactgtgcgcttacctcctttgccatgcttgattagcaccggtgggttgctgaaacccaccatttgtagcgccacatcttctctttcttcctcgctgtccacgattacctctggtgatggcgggcgctcgggcttgggagaagggcgcttctttttcttcttgggcgcaatggccaaatccgccgccgaggtcgatggccgcgggctgggtgtgcgcggcaccagcgcgtcttgtgatgagtcttcctcgtcctcggactcgatacgccgcctcatccgcttttttgggggcgcccggggaggcggcggcgacggggacggggacgacacgtcctccatggttgggggacgtcgcgccgcaccgcgtccgcgctcgggggtggtttcgcgctgctcctcttcccgactggccatttccttctcctataggcagaaaaagatcatggagtcagtcgagaagaaggacagcctaaccgccccctctgagttcgccaccaccgcctccaccgatgccgccaacgcgcctaccaccttccccgtcgaggcacccccgcttgaggaggaggaagtgattatcgagcaggacccaggttttgtaagcgaagacgacgaggaccgctcagtaccaacagaggataaaaagcaagaccaggacaacgcagaggcaaacgaggaacaagtcgggcggggggacgaaaggcatggcgactacctagatgtgggagacgacgtgctgttgaagcatctgcagcgccagtgcgccattatctgcgacgcgttgcaagagcgcagcgatgtgcccctcgccatagcggatgtcagccttgcctacgaacgccacctattctcaccgcgcgtaccccccaaacgccaagaaaacggcacatgcgagcccaacccgcgcctcaacttctaccccgtatttgccgtgccagaggtgcttgccacctatcacatctttttccaaaactgcaagatacccctatcctgccgtgccaaccgcagccgagcggacaagcagctggccttgcggcagggcgctgtcatacctgatatcgcctcgctcaacgaagtgccaaaaatctttgagggtcttggacgcgacgagaagcgcgcggcaaacgctctgcaacaggaaaacagcgaaaatgaaagtcactctggagtgttggtggaactcgagggtgacaacgcgcgcctagccgtactaaaacgcagcatcgaggtcacccactttgcctacccggcacttaacctaccccccaaggtcatgagcacagtcatgagtgagctgatcgtgcgccgtgcgcagcccctggagagggatgcaaatttgcaagaacaaacagaggagggcctacccgcagttggcgacgagcagctagcgcgctggcttcaaacgcgcgagcctgccgacttggaggagcgacgcaaactaatgatggccgcagtgctcgttaccgtggagcttgagtgcatgcagcggttctttgctgacccggagatgcagcgcaagctagaggaaacattgcactacacctttcgacagggctacgtacgccaggcctgcaagatctccaacgtggagctctgcaacctggtctcctaccttggaattttgcacgaaaaccgccttgggcaaaacgtgcttcattccacgctcaagggcgaggcgcgccgcgactacgtccgcgactgcgtttacttatttctatgctacacctggcagacggccatgggcgtttggcagcagtgcttggaggagtgcaacctcaaggagctgcagaaactgctaaagcaaaacttgaaggacctatggacggccttcaacgagcgctccgtggccgcgcacctggcggacatcattttccccgaacgcctgcttaaaaccctgcaacagggtctgccagacttcaccagtcaaagcatgttgcagaactttaggaactttatcctagagcgctcaggaatcttgcccgccacctgctgtgcacttcctagcgactttgtgcccattaagtaccgcgaatgccctccgccgctttggggccactgctaccttctgcagctagccaactaccttgcctaccactctgacataatggaagacgtgagcggtgacggtctactggagtgtcactgtcgctgcaacctatgcaccccgcaccgctccctggtttgcaattcgcagctgcttaacgaaagtcaaattatcggtacctttgagctgcagggtccctcgcctgacgaaaagtccgcggctccggggttgaaactcactccggggctgtggacgtcggcttaccttcgcaaatttgtacctgaggactaccacgcccacgagattaggttctacgaagaccaatcccgcccgcctaatgcggagcttaccgcctgcgtcattacccagggccacattcttggccaattgcaagccatcaacaaagcccgccaagagtttctgctacgaaagggacggggggtttacttggacccccagtccggcgaggagctcaacccaatccccccgccgccgcagccctatcagcagcagccgcgggcccttgcttcccaggatggcacccaaaaagaagctgcagctgccgccgccacccacggacgaggaggaatactgggacagtcaggcagaggaggttttggacgaggaggaggaggacatgatggaagactgggagagcctagacgaggaagcttccgaggtcgaagaggtgtcagacgaaacaccgtcaccctcggtcgcattcccctcgccggcgccccagaaatcggcaaccggttccagcatggctacaacctccgctcctcaggcgccgccggcactgcccgttcgccgacccaaccgtagatgggacaccactggaaccagggccggtaagtccaagcagccgccgccgttagcccaagagcaacaacagcgccaaggctaccgctcatggcgcgggcacaagaacgccatagttgcttgcttgcaagactgtgggggcaacatctccttcgcccgccgctttcttctctaccatcacggcgtggccttcccccgtaacatcctgcattactaccgtcatctctacagcccatactgcaccggcggcagcggcagcaacagcagcggccacacagaagcaaaggcgaccggatagcaagactctgacaaagcccaagaaatccacagcggcggcagcagcaggaggaggagcgctgcgtctggcgcccaacgaacccgtatcgacccgcgagcttagaaacaggatttttcccactctgtatgctatatttcaacagagcaggggccaagaacaagagctgaaaataaaaaacaggtctctgcgatccctcacccgcagctgcctgtatcacaaaagcgaagatcagcttcggcgcacgctggaagacgcggaggctctcttcagtaaatactgcgcgctgactcttaaggactagtttcgcgccctttctcaaatttaagcgcgaaaactacgtcatctccagcggccacacccggcgccagcacctgttgtcagcgccattatgagcaaggaaattcccacgccctacatgtggagttaccagccacaaatgggacttgcggctggagctgcccaagactactcaacccgaataaactacatgagcgcggggcggccgccgtttgtgttatgtttcaacgtgtttatttttcaattgcagaaaatttcaagtcatttttcattcagtagtatagccccaccaccacatagcttatacagatcaccgtaccttaatcaaactcacagaaccctagtattcaacctgccacctccctcccaacacacagagtacacagtcctttctccccggctggccttaaaaagcatcatatcatgggtaacagacatattcttaggtgttatattccacacggtttcctgtcgagccaaacgctcatcagtgatattaataaactccccgggcagctcacttaagttcatgtcgctgtccagctgctgagccacaggctgctgtccaacttgcggttgcttaacgggcggcgaaggagaagtccacgcctacatgggggtagagtcataatcgtgcatcaggatagggcggtggtgctgcagcagcgcgcgaataaactgctgccgccgccgctccgtcctgcaggaatacaacatggcagtggtctcctcagcgatgattcgcaccgcccgcagcataaggcgccttgtcctccgggcacagcagcgcaccctgatctcacttaaatcagcacagtaactgcagcacagcaccacaatattgttcaaaatcccacagtgcaaggcgctgtatccaaagctcatggcggggaccacagaacccacgtggccatcataccacaagcgcaggtagattaagtggcgacccctcataaacacgctggacataaacattacctcttttggcatgttgtaattcaccacctcccggtaccatataaacctctgattaaacatggcgccatccaccaccatcctaaaccagctggccaaaacctgcccgccggctatacactgcagggaaccgggactggaacaatgacagtggagagcccaggactcgtaaccatggatcatcatgctcgtcatgatatcaatgttggcacaacacaggcacacgtgcatacacttcctcaggattacaagctcctcccgcgttagaaccatatcccagggaacaacccattcctgaatcagcgtaaatcccacactgcagggaagacctcgcacgtaactcacgttgtgcattgtcaaagtgttacattcgggcagcagcggatgatcctccagtatggtagcgcgggtttctgtctcaaaaggaggtagacgatccctactgtacggagtgcgccgagacaaccgagatcgtgttggtcgtagtgtcatgccaaatggaacgccggacgtagtcatatttcctgaagcaaaaccaggtgcgggcgtgacaaacagatctgcgtctccggtctcgccgcttagatcgctctgtgtagtagttgtagtatatccactctctcaaagcatccaggcgccccctggcttcgggttctatgtaaactccttcatgcgccgctgccctgataacatccaccaccgcagaataagccacacccagccaacctacacattcgttctgcgagtcacacacgggaggagcgggaagagctggaagaaccatgtttttttttttattccaaaagattatccaaaacctcaaaatgaagatctattaagtgaacgcgctcccctccggtggcgtggtcaaactctacagccaaagaacagataatggcatttgtaagatgttgcacaatggcttccaaaaggcaaacggccctcacgtccaagtggacgtaaaggctaaacccttcagggtgaatctcctctataaacattccagcaccttcaaccatgcccaaataattctcatctcgccaccttctcaatatatctctaagcaaatcccgaatattaagtccggccattgtaaaaatctgctccagagcgccctccaccttcagcctcaagcagcgaatcatgattgcaaaaattcaggttcctcacagacctgtataagattcaaaagcggaacattaacaaaaataccgcgatcccgtaggtcccttcgcagggccagctgaacataatcgtgcaggtctgcacggaccagcgcggccacttccccgccaggaaccatgacaaaagaacccacactgattatgacacgcatactcggagctatgctaaccagcgtagccccgatgtaagcttgttgcatgggcggcgatataaaatgcaaggtgctgctcaaaaaatcaggcaaagcctcgcgcaaaaaagaaagcacatcgtagtcatgctcatgcagataaaggcaggtaagctccggaaccaccacagaaaaagacaccatttttctctcaaacatgtctgcgggtttctgcataaacacaaaataaaataacaaaaaaacatttaaacattagaagcctgtcttacaacaggaaaaacaacccttataagcataagacggactacggccatgccggcgtgaccgtaaaaaaactggtcaccgtgattaaaaagcaccaccgacagctcctcggtcatgtccggagtcataatgtaagactcggtaaacacatcaggttgattcacatcggtcagtgctaaaaagcgaccgaaatagcccgggggaatacatacccgcaggcgtagagacaacattacagcccccataggaggtataacaaaattaataggagagaaaaacacataaacacctgaaaaaccctcctgcctaggcaaaatagcaccctcccgctccagaacaacatacagcgcttccacagcggcagccataacagtcagccttaccagtaaaaaagaaaacctattaaaaaaacaccactcgacacggcaccagctcaatcagtcacagtgtaaaaaagggccaagtgcagagcgagtatatataggactaaaaaatgacgtaacggttaaagtccacaaaaaacacccagaaaaccgcacgcgaacctacgcccagaaacgaaagccaaaaaacccacaacttcctcaaatcgtcacttccgttttcccacgttacgtcacttcccattttaagaaaactacaattcccaacacatacaagttactccgcccttaattaaatcggatccgatatctagatgtattcgcgaggtaccgagctcgaattctctggccgtcgttttacaacgtcgtgactgggaaaaccctggcgttacccaacttaatcgccttgcagcacatccccctttcgccagctggcgtaatagcgaagaggcccgcaccgatcgcccttcccaacagttgcgcagcctgaatggcgaatggcgcctgatgcggtattttctccttacgcatctgtgcggtatttcacaccgcatatcttcatttaaatgtgtgtcagttagggtgtggaaagtccccaggctccccagcaggcagaagtatgcaaagcatgcatctcaattagtcagcaaccaggtgtggaaagtccccaggctccccagcaggcagaagtatgcaaagcatgcatctcaattagtcagcaaccatagtcccgcccctaactccgcccatcccgcccctaactccgcccagttccgcccattctccgccccatggctgactaattttttttatttatgcagaggccgaggccgcctcggcctctgagctattccagaagtagtgaggaggcttttttggaggcctaggcttttgcaaacgccggcgcaccgcgggcccgatccaccggtactgttggtaaagccaccatgttttccggtggcggcggcccgctgtcccccggaggaaagtcggcggccagggcggcgtccgggttttttgcgcccgccggccctcgcggagccagccggggacccccgccttgtttgaggcaaaacttttacaacccctacctcgccccagtcgggacgcaacagaagccgaccgggccaacccagcgccatacgtactatagcgaatgcgatgaatttcgattcatcgccccgcgggtgctggacgaggatgcccccccggagaagcgcgccggggtgcacgacggtcacctcaagcgcgcccccaaggtgtactgcgggggggacgagcgcgacgtcctccgcgtcgggtcgggcggcttctggccgcggcgctcgcgcctgtggggcggcgtggaccacgccccggcggggttcaaccccaccgtcaccgtctttcacgtgtacgacatcctggagaacgtggagcacgcgtacggcatgcgcgcggcccagttccacgcgcggtttatggacgccatcacaccgacggggaccgtcatcacgctcctgggcctgactccggaaggccaccgggtggccgttcacgtttacggcacgcggcagtacttttacatgaacaaggaggaggtcgacaggcacctacaatgccgcgccccacgagatctctgcgagcgcatggccgcggccctgcgcgagtccccgggcgcgtcgttccgcggcatctccgcggaccacttcgaggcggaggtggtggagcgcaccgacgtgtactactacgagacgcgccccgctctgttttaccgcgtctacgtccgaagcgggcgcgtgctgtcgtacctgtgcgacaacttctgcccggccatcaagaagtacgagggtggggtcgacgccaccacccggttcatcctggacaaccccgggttcgtcaccttcggctggtaccgtctcaaaccgggccggaacaacacgctagcccagccgcgggccccgatggccttcgggacatccagcgacgtcgagtttaactgtacggcggacaacctggccatcgaggggggcatgagcgacctaccggcatacaagctcatgtgcttcgatatcgaatgcaaggcggggggggaggacgagctggcctttccggtggccgggcacccggaggacctggtcatccagatatcctgtctgctctacgacctgtccaccaccgccctggagcacgtcctcctgttttcgctcggttcctgcgacctccccgaatcccacctgaacgagctggcggccaggggcctgcccacgcccgtggttctggaattcgacagcgaattcgagatgctgttggccttcatgacccttgtgaaacagtacggccccgagttcgtgaccgggtacaacatcatcaacttcgactggcccttcttgctggccaagctgacggacatttacaaggtccccctggacgggtacggccgcatgaacggccggggcgtgtttcgcgtgtgggacataggccagagccacttccagaagcgcagcaagataaaggtgaacggcatggtgaacatcgacatgtacgggattataaccgacaagatcaagctctcgagctacaagctcaacgccgtggccgaagccgtcctgaaggacaagaagaaggacctgagctatcgcgacatccccgcctactacgccgccgggcccgcgcaacgcggggtgatcggcgagtactgcatacaggattccctgctggtgggccagctgttttttaagtttttgccccatctggagctctcggccgtcgcgcgcttggcgggtattaacatcacccgcaccatctacgacggccagcagatccgcgtctttacgtgcctgctgcgcctggccgaccagaagggctttattctgccggacacccaggggcgatttaggggcgccgggggggaggcgcccaagcgtccggccgcagcccgggaggacgaggagcggccagaggaggagggggaggacgaggacgaacgcgaggagggcgggggcgagcgggagccggagggcgcgcgggagaccgccggcaggcacgtggggtaccagggggccagggtccttgaccccacttccgggtttcacgtgaaccccgtggtggtgttcgactttgccagcctgtaccccagcatcatccaggcccacaacctgtgcttcagcacgctctccctgagggccgacgcagtggcgcacctggaggcgggcaaggactacctggagatcgaggtgggggggcgacggctgttcttcgtcaaggctcacgtgcgagagagcctcctcagcatcctcctgcgggactggctcgccatgcgaaagcagatccgctcgcggattccccagagcagccccgaggaggccgtgctcctggacaagcagcaggccgccatcaaggtcgtgtgtaactcggtgtacgggttcacgggagtgcagcacggactcctgccgtgcctgcacgttgccgcgacggtgacgaccatcggccgcgagatgctgctcgcgacccgcgagtacgtccacgcgcgctgggcggccttcgaacagctcctggccgatttcccggaggcggccgacatgcgcgcccccgggccctattccatgcgcatcatctacggggacacggactccatctttgtgctgtgccgcggcctcacggccgccgggctgacggccgtgggcgacaagatggcgagccacatctcgcgcgcgctgtttctgccccccatcaaactcgagtgcgaaaagacgttcaccaagctgctgctgatcgccaagaaaaagtacatcggcgtcatctacgggggtaagatgctcatcaagggcgtggatctggtgcgcaaaaacaactgcgcgtttatcaaccgcacctccagggccctggtcgacctgctgttttacgacgataccgtctccggagccgccgcggcgttagccgagcgccccgcggaggagtggctggcgcgacccctgcccgagggactgcaggcgttcggggccgtcctcgtagacgcccatcggcgcatcaccgacccggagagggacatccaggactttgtcctcaccgccgaactgagcagacacccgcgcgcgtacaccaacaagcgcctggcccacctgacggtgtattacaagctcatggcccgccgcgcgcaggtcccgtccatcaaggaccggatcccgtacgtgatcgtggcccagacccgcgaggtagaggagacggtcgcgcggctggccgccctccgcgagctagacgccgccgccccaggggacgagcccgccccccccgcggccctgccctccccggccaagcgcccccgggagacgccgtcgcctgccgaccccccgggaggcgcgtccaagccccgcaagctgctggtgtccgagctggccgaggatcccgcatacgccattgcccacggcgtcgccctgaacacggactattacttctcccacctgttgggggcggcgtgcgtgacattcaaggccctgtttgggaataacgccaagatcaccgagagtctgttaaaaaggtttattcccgaagtgtggcaccccccggacgacgtggccgcgcggctccggaccgcagggttcggggcggtgggtgccggcgctacggcggaggaaactcgtcgaatgttgcatagagcctttgatactctagcagaattcggcagtggagcaacaaacttctctctgctgaaacaagccggagatgtcgaagagaatcctggaccgacggattcccctggcggtgtggcccccgcctcccccgtggaggacgcgtcggacgcgtccctcgggcagccggaggagggggcgccctgccaggtggtcctgcagggcgccgaacttaatggaatcctacaggcgtttgccccgctgcgcacgagccttctggactcgcttctggttatgggcgaccggggcatccttatccataacacgatctttggggagcaggtgttcctgcccctggaacactcgcaattcagtcggtatcgctggcgcggacccacggcggcgttcctgtctctcgtggaccagaagcgctccctcctgagcgtgtttcgcgccaaccagtacccggacctacgtcgggtggagttggcgatcacgggccaggccccgtttcgcacgctggttcagcgcatatggacgacgacgtccgacggcgaggccgttgagctagccagcgagacgctgatgaagcgcgaactgacgagctttgtggtgctggttccccagggaacccccgacgttcagttgcgcctgacgaggccgcagctcaccaaggtccttaacgcgaccggggccgatagtgccacgcccaccacgttcgagctcggggttaacggcaaattttccgtgttcaccacgagtacctgcgtcacctttgctgcccgcgaggagggcgtgtcgtccagcaccagcacccaggtccagatcctgtccaacgcgctcaccaaggcgggccaggccgccgcgaacgccaagacggtgtacggggaaaatacccatcgcaccttctctgtggtcgtcgacgattgcagcatgcgggcggtgctccggcgactgcaggtcggcgggggcaccctcaagttcttcctcacgacccccgtccccagtctgtgcgtcaccgccaccggtcccaacgcggtatcggcggtatttctcctgaaaccccagaagatttgcctggactggctgggtcatagccaggggtctccttcagccgggagctcggcctcccgggcctctgggagcgagccaacagacagccaggactccgcgtcggacgcggtcagccacggcgatccggaagacctcgatggcgctgcccgggcgggagaggcgggggccttgcatgcctgtccgatgccgtcgtcgaccacgcgggtcactcccacgaccaagcgggggcgctcggggggcgaggatgcgcgcgcggacacggccctaaagaaacctaagacggggtcgcccaccgcacccccgcccgcagatccagtccccctggacacggaggacgactccgatgcggcggacgggacggcggcccgtcccgccgctccagacgcccggagcggaagccgttacgcgtgttactttcgcgacctcccgaccggagaagcaagccccggcgccttctccgccttccgggggggcccccaaaccccgtatggttttggattcccctgataggatccgactgcaggtagctgtgccttctagttgccagccatctgttgtttgcccctcccccgtgccttccttgaccctggaaggtgccactcccactgtcctttcctaataaaatgaggaaattgcatcgcattgtctgagtaggtgtcattctattctggggggtggggtggggcaggacagcaagggggaggattgggaagacaatagcaggcatgctggggatgcggtgggctctatgggttttatggtgcactctcagtacaatctgctctgatgccgcatagttaagccagccccgacacccgccaacacccgctgacgcgccctgacgggcttgtctgctcccggcatccgcttacagacaagctgtgaccgtctccgggagctgcatgtgtcagaggttttcaccgtcatcaccgaaacgcgcga

SEQ ID NO: 100 - DNA, 17250 bp, Artificial Sequence
  Description of Artificial Sequence: Synthetic polynucleotide
tgcagctctggcccgtgtctcaaaatctctgatgttacattgcacaagataaaaatatatcatcatgaacaataaaactgtctgcttacataaacagtaatacaaggggtgttatgagccatattcaacgggaaacgtcgaggccgcgattaaattccaacatggatgctgatttatatgggtataaatgggctcgcgataatgtcgggcaatcaggtgcgacaatctatcgcttgtatgggaagcccgatgcgccagagttgtttctgaaacatggcaaaggtagcgttgccaatgatgttacagatgagatggtcagactaaactggctgacggaatttatgcctcttccgaccatcaagcattttatccgtactcctgatgatgcatggttactcaccactgcgatccccggaaaaacagcattccaggtattagaagaatatcctgattcaggtgaaaatattgttgatgcgctggcagtgttcctgcgccggttgcattcgattcctgtttgtaattgtccttttaacagcgatcgcgtatttcgtctcgctcaggcgcaatcacgaatgaataacggtttggttgatgcgagtgattttgatgacgagcgtaatggctggcctgttgaacaagtctggaaagaaatgcataaacttttgccattctcaccggattcagtcgtcactcatggtgatttctcacttgataaccttatttttgacgaggggaaattaataggttgtattgatgttggacgagtcggaatcgcagaccgataccaggatcttgccatcctatggaactgcctcggtgagttttctccttcattacagaaacggctttttcaaaaatatggtattgataatcctgatatgaataaattgcagtttcatttgatgctcgatgagtttttctaatcagaattggttaattggttgtaacattattcagattgggcttgatttaaaacttcatttttaatttaaaaggatctaggtgaagatcctttttgataatctcatgaccaaaatcccttaacgtgagttttcgttccactgagcgtcagaccccgtagaaaagatcaaaggatcttcttgagatcctttttttctgcgcgtaatctgctgcttgcaaacaaaaaaaccaccgctaccagcggtggtttgtttgccggatcaagagctaccaactctttttccgaaggtaactggcttcagcagagcgcagataccaaatactgttcttctagtgtagccgtagttaggccaccacttcaagaactctgtagcaccgcctacatacctcgctctgctaatcctgttaccagtggctgctgccagtggcgataagtcgtgtcttaccgggttggactcaagacgatagttaccggataaggcgcagcggtcgggctgaacggggggttcgtgcacacagcccagcttggagcgaacgacctacaccgaactgagatacctacagcgtgagctatgagaaagcgccacgcttcccgaagggagaaaggcggacaggtatccggtaagcggcagggtcggaacaggagagcgcacgagggagcttccagggggaaacgcctggtatctttatagtcctgtcgggtttcgccacctctgacttgagcgtcgatttttgtgatgctcgtcaggggggcggagcctatggaaaaacgccagcaacgcggcctttttacggttcctggccttttgctggccttttgctcacatgttctttcctgcgttatcccctgattctgtggataaccgtattaccgcctttgagtgagctgataccgctcgccgcagccgaacgaccgagcgcagcgagtcagtgagcgaggaagcggaagagcgcccaatacgcaaaccgcctctccccgcgcgttggccgattcattaatgcagctggcacgacaggtttcccgactggaaagcgggcagtgagcgcaacgcaattaatgtgagttagctcactcattaggcaccccaggctttacactttatgcttccggctcgtatgttgtgtggaattgtgagcggataacaatttcacacaggaaacagctatgaccatgattacaccaagcttgcatgcaggcctatccgtagatgtacctggacatccaggtgatgccggcggcggtggtggaggcgcgcggaaagtcgcggacgcggttccagatgttgcgcagcggcaaaaagtgctccatggtcgggacgctctggccggtgaggcgtgcgcagtcgttgacgctctagaccgtgcaaaaggagagcctgtaagcgggcactcttccgtggtctggtggataaattcgcaagggtatcatggcggacgaccggggttcgaaccccggatccggccgtccgccgtgatccatgcggttaccgcccgcgtgtcgaacccaggtgtgcgacgtcagacaacgggggagcgctccttttggcttccttccaggcgcggcggctgctgcgctagcttttttggccactggccgcgcgcggcgtaagcggttaggctggaaagcgaaagcattaagtggctcgctccctgtagccggagggttattttccaagggttgagtcgcaggacccccggttcgagtctcgggccggccggactgcggcgaacgggggtttgcctccccgtcatgcaagaccccgcttgcaaattcctccggaaacagggacgagccccttttttgcttttcccagatgcatccggtgctgcggcagatgcgcccccctcctcagcagcggcaagagcaagagcagcggcagacatgcagggcaccctccccttctcctaccgcgtcaggaggggcaacatcgatccagacatgataagatacattgatgagtttggacaaaccacaactagaatgcagtgaaaaaaatgctttatttgtgaaatttgtgatgctattgctttatttgtaaccattataagctgcaataaacaagtttgtacactctcgggtgattatttacccccacccttgccgtctgcgccgtttaaaaatcaaaggggttctgccgcgcatcgctatgcgccactggcagggacacgttgcgatactggtgtttagtgctccacttaaactcaggcacaaccatccgcggcagctcggtgaagttttcactccacaggctgcgcaccatcaccaacgcgtttagcaggtcgggcgccgatatcttgaagtcgcagttggggcctccgccctgcgcgcgcgagttgcgatacacagggttgcagcactggaacactatcagcgccgggtggtgcacgctggccagcacgctcttgtcggagatcagatccgcgtccaggtcctccgcgttgctcagggcgaacggagtcaactttggtagctgccttcccaaaaagggcgcgtgcccaggctttgagttgcactcgcaccgtagtggcatcaaaaggtgaccgtgcccggtctgggcgttaggatacagcgcctgcataaaagccttgatctgcttaaaagccacctgagcctttgcgccttcagagaagaacatgccgcaagacttgccggaaaactgattggccggacaggccgcgtcgtgcacgcagcaccttgcgtcggtgttggagatctgcaccacatttcggccccaccggttcttcacgatcttggccttgctagactgctccttcagcgcgcgctgcccgttttcgctcgtcacatccatttcaatcacgtgctccttatttatcataatgcttccgtgtagacacttaagctcgccttcgatctcagcgcagcggtgcagccacaacgcgcagcccgtgggctcgtgatgcttgtaggtcacctctgcaaacgactgcaggtacgcctgcaggaatcgccccatcatcgtcacaaaggtcttgttgctggtgaaggtcagctgcaacccgcggtgctcctcgttcagccaggtcttgcatacggccgccagagcttccacttggtcaggcagtagtttgaagttcgcctttagatcgttatccacgtggtacttgtccatcagcgcgcgcgcagcctccatgcccttctcccacgcagacacgatcggcacactcagcgggttcatcaccgtaatttcactttccgcttcgctgggctcttcctcttcctcttgcgtccgcataccacgcgccactgggtcgtcttcattcagccgccgcactgtgcgcttacctcctttgccatgcttgattagcaccggtgggttgctgaaacccaccatttgtagcgccacatcttctctttcttcctcgctgtccacgattacctctggtgatggcgggcgctcgggcttgggagaagggcgcttctttttcttcttgggcgcaatggccaaatccgccgccgaggtcgatggccgcgggctgggtgtgcgcggcaccagcgcgtcttgtgatgagtcttcctcgtcctcggactcgatacgccgcctcatccgcttttttgggggcgcccggggaggcggcggcgacggggacggggacgacacgtcctccatggttgggggacgtcgcgccgcaccgcgtccgcgctcgggggtggtttcgcgctgctcctcttcccgactggccatttccttctcctataggcagaaaaagatcatggagtcagtcgagaagaaggacagcctaaccgccccctctgagttcgccaccaccgcctccaccgatgccgccaacgcgcctaccaccttccccgtcgaggcacccccgcttgaggaggaggaagtgattatcgagcaggacccaggttttgtaagcgaagacgacgaggaccgctcagtaccaacagaggataaaaagcaagaccaggacaacgcagaggcaaacgaggaacaagtcgggcggggggacgaaaggcatggcgactacctagatgtgggagacgacgtgctgttgaagcatctgcagcgccagtgcgccattatctgcgacgcgttgcaagagcgcagcgatgtgcccctcgccatagcggatgtcagccttgcctacgaacgccacctattctcaccgcgcgtaccccccaaacgccaagaaaacggcacatgcgagcccaacccgcgcctcaacttctaccccgtatttgccgtgccagaggtgcttgccacctatcacatctttttccaaaactgcaagatacccctatcctgccgtgccaaccgcagccgagcggacaagcagctggccttgcggcagggcgctgtcatacctgatatcgcctcgctcaacgaagtgccaaaaatctttgagggtcttggacgcgacgagaagcgcgcggcaaacgctctgcaacaggaaaacagcgaaaatgaaagtcactctggagtgttggtggaactcgagggtgacaacgcgcgcctagccgtactaaaacgcagcatcgaggtcacccactttgcctacccggcacttaacctaccccccaaggtcatgagcacagtcatgagtgagctgatcgtgcgccgtgcgcagcccctggagagggatgcaaatttgcaagaacaaacagaggagggcctacccgcagttggcgacgagcagctagcgcgctggcttcaaacgcgcgagcctgccgacttggaggagcgacgcaaactaatgatggccgcagtgctcgttaccgtggagcttgagtgcatgcagcggttctttgctgacccggagatgcagcgcaagctagaggaaacattgcactacacctttcgacagggctacgtacgccaggcctgcaagatctccaacgtggagctctgcaacctggtctcctaccttggaattttgcacgaaaaccgccttgggcaaaacgtgcttcattccacgctcaagggcgaggcgcgccgcgactacgtccgcgactgcgtttacttatttctatgctacacctggcagacggccatgggcgtttggcagcagtgcttggaggagtgcaacctcaaggagctgcagaaactgctaaagcaaaacttgaaggacctatggacggccttcaacgagcgctccgtggccgcgcacctggcggacatcattttccccgaacgcctgcttaaaaccctgcaacagggtctgccagacttcaccagtcaaagcatgttgcagaactttaggaactttatcctagagcgctcaggaatcttgcccgccacctgctgtgcacttcctagcgactttgtgcccattaagtaccgcgaatgccctccgccgctttggggccactgctaccttctgcagctagccaactaccttgcctaccactctgacataatggaagacgtgagcggtgacggtctactggagtgtcactgtcgctgcaacctatgcaccccgcaccgctccctggtttgcaattcgcagctgcttaacgaaagtcaaattatcggtacctttgagctgcagggtccctcgcctgacgaaaagtccgcggctccggggttgaaactcactccggggctgtggacgtcggcttaccttcgcaaatttgtacctgaggactaccacgcccacgagattaggttctacgaagaccaatcccgcccgcctaatgcggagcttaccgcctgcgtcattacccagggccacattcttggccaattgcaagccatcaacaaagcccgccaagagtttctgctacgaaagggacggggggtttacttggacccccagtccggcgaggagctcaacccaatccccccgccgccgcagccctatcagcagcagccgcgggcccttgcttcccaggatggcacccaaaaagaagctgcagctgccgccgccacccacggacgaggaggaatactgggacagtcaggcagaggaggttttggacgaggaggaggaggacatgatggaagactgggagagcctagacgaggaagcttccgaggtcgaagaggtgtcagacgaaacaccgtcaccctcggtcgcattcccctcgccggcgccccagaaatcggcaaccggttccagcatggctacaacctccgctcctcaggcgccgccggcactgcccgttcgccgacccaaccgtagatgggacaccactggaaccagggccggtaagtccaagcagccgccgccgttagcccaagagcaacaacagcgccaaggctaccgctcatggcgcgggcacaagaacgccatagttgcttgcttgcaagactgtgggggcaacatctccttcgcccgccgctttcttctctaccatcacggcgtggccttcccccgtaacatcctgcattactaccgtcatctctacagcccatactgcaccggcggcagcggcagcaacagcagcggccacacagaagcaaaggcgaccggatagcaagactctgacaaagcccaagaaatccacagcggcggcagcagcaggaggaggagcgctgcgtctggcgcccaacgaacccgtatcgacccgcgagcttagaaacaggatttttcccactctgtatgctatatttcaacagagcaggggccaagaacaagagctgaaaataaaaaacaggtctctgcgatccctcacccgcagctgcctgtatcacaaaagcgaagatcagcttcggcgcacgctggaagacgcggaggctctcttcagtaaatactgcgcgctgactcttaaggactagtttcgcgccctttctcaaatttaagcgcgaaaactacgtcatctccagcggccacacccggcgccagcacctgttgtcagcgccattatgagcaaggaaattcccacgccctacatgtggagttaccagccacaaatgggacttgcggctggagctgcccaagactactcaacccgaataaactacatgagcgcggggcggccgccgtttgtgttatgtttcaacgtgtttatttttcaattgcagaaaatttcaagtcatttttcattcagtagtatagccccaccaccacatagcttatacagatcaccgtaccttaatcaaactcacagaaccctagtattcaacctgccacctccctcccaacacacagagtacacagtcctttctccccggctggccttaaaaagcatcatatcatgggtaacagacatattcttaggtgttatattccacacggtttcctgtcgagccaaacgctcatcagtgatattaataaactccccgggcagctcacttaagttcatgtcgctgtccagctgctgagccacaggctgctgtccaacttgcggttgcttaacgggcggcgaaggagaagtccacgcctacatgggggtagagtcataatcgtgcatcaggatagggcggtggtgctgcagcagcgcgcgaataaactgctgccgccgccgctccgtcctgcaggaatacaacatggcagtggtctcctcagcgatgattcgcaccgcccgcagcataaggcgccttgtcctccgggcacagcagcgcaccctgatctcacttaaatcagcacagtaactgcagcacagcaccacaatattgttcaaaatcccacagtgcaaggcgctgtatccaaagctcatggcggggaccacagaacccacgtggccatcataccacaagcgcaggtagattaagtggcgacccctcataaacacgctggacataaacattacctcttttggcatgttgtaattcaccacctcccggtaccatataaacctctgattaaacatggcgccatccaccaccatcctaaaccagctggccaaaacctgcccgccggctatacactgcagggaaccgggactggaacaatgacagtggagagcccaggactcgtaaccatggatcatcatgctcgtcatgatatcaatgttggcacaacacaggcacacgtgcatacacttcctcaggattacaagctcctcccgcgttagaaccatatcccagggaacaacccattcctgaatcagcgtaaatcccacactgcagggaagacctcgcacgtaactcacgttgtgcattgtcaaagtgttacattcgggcagcagcggatgatcctccagtatggtagcgcgggtttctgtctcaaaaggaggtagacgatccctactgtacggagtgcgccgagacaaccgagatcgtgttggtcgtagtgtcatgccaaatggaacgccggacgtagtcatatttcctgaagcaaaaccaggtgcgggcgtgacaaacagatctgcgtctccggtctcgccgcttagatcgctctgtgtagtagttgtagtatatccactctctcaaagcatccaggcgccccctggcttcgggttctatgtaaactccttcatgcgccgctgccctgataacatccaccaccgcagaataagccacacccagccaacctacacattcgttctgcgagtcacacacgggaggagcgggaagagctggaagaaccatgtttttttttttattccaaaagattatccaaaacctcaaaatgaagatctattaagtgaacgcgctcccctccggtggcgtggtcaaactctacagccaaagaacagataatggcatttgtaagatgttgcacaatggcttccaaaaggcaaacggccctcacgtccaagtggacgtaaaggctaaacccttcagggtgaatctcctctataaacattccagcaccttcaaccatgcccaaataattctcatctcgccaccttctcaatatatctctaagcaaatcccgaatattaagtccggccattgtaaaaatctgctccagagcgccctccaccttcagcctcaagcagcgaatcatgattgcaaaaattcaggttcctcacagacctgtataagattcaaaagcggaacattaacaaaaataccgcgatcccgtaggtcccttcgcagggccagctgaacataatcgtgcaggtctgcacggaccagcgcggccacttccccgccaggaaccatgacaaaagaacccacactgattatgacacgcatactcggagctatgctaaccagcgtagccccgatgtaagcttgttgcatgggcggcgatataaaatgcaaggtgctgctcaaaaaatcaggcaaagcctcgcgcaaaaaagaaagcacatcgtagtcatgctcatgcagataaaggcaggtaagctccggaaccaccacagaaaaagacaccatttttctctcaaacatgtctgcgggtttctgcataaacacaaaataaaataacaaaaaaacatttaaacattagaagcctgtcttacaacaggaaaaacaacccttataagcataagacggactacggccatgccggcgtgaccgtaaaaaaactggtcaccgtgattaaaaagcaccaccgacagctcctcggtcatgtccggagtcataatgtaagactcggtaaacacatcaggttgattcacatcggtcagtgctaaaaagcgaccgaaatagcccgggggaatacatacccgcaggcgtagagacaacattacagcccccataggaggtataacaaaattaataggagagaaaaacacataaacacctgaaaaaccctcctgcctaggcaaaatagcaccctcccgctccagaacaacatacagcgcttccacagcggcagccataacagtcagccttaccagtaaaaaagaaaacctattaaaaaaacaccactcgacacggcaccagctcaatcagtcacagtgtaaaaaagggccaagtgcagagcgagtatatataggactaaaaaatgacgtaacggttaaagtccacaaaaaacacccagaaaaccgcacgcgaacctacgcccagaaacgaaagccaaaaaacccacaacttcctcaaatcgtcacttccgttttcccacgttacgtcacttcccattttaagaaaactacaattcccaacacatacaagttactccgcccttaattaaatcggatccgatatctagatgtattcgcgaggtaccgagctcgaattctctggccgtcgttttacaacgtcgtgactgggaaaaccctggcgttacccaacttaatcgccttgcagcacatccccctttcgccagctggcgtaatagcgaagaggcccgcaccgatcgcccttcccaacagttgcgcagcctgaatggcgaatggcgcctgatgcggtattttctccttacgcatctgtgcggtatttcacaccgcataaaacccatagagcccaccgcatccccagcatgcctgctattgtcttcccaatcctcccccttgctgtcctgccccaccccaccccccagaatagaatgacacctactcagacaatgcgatgcaatttcctcattttattaggaaaggacagtgggagtggcaccttccagggtcaaggaaggcacgggggaggggcaaacaacagatggctggcaactagaaggcacagctacctgcagtcggatcctatcaggggaatccaaaaccatacggggtttgggggcccccccggaaggcggagaaggcgccggggcttgcttctccggtcgggaggtcgcgaaagtaacacgcgtaacggcttccgctccgggcgtctggagcggcgggacgggccgccgtcccgtccgccgcatcggagtcgtcctccgtgtccagggggactggatctgcgggcgggggtgcggtgggcgaccccgtcttaggtttctttagggccgtgtccgcgcgcgcatcctcgccccccgagcgcccccgcttggtcgtgggagtgacccgcgtggtcgacgacggcatcggacaggcatgcaaggcccccgcctctcccgcccgggcagcgccatcgaggtcttccggatcgccgtggctgaccgcgtccgacgcggagtcctggctgtctgttggctcgctcccagaggcccgggaggccgagctcccggctgaaggagacccctggctatgacccagccagtccaggcaaatcttctggggtttcaggagaaataccgccgataccgcgttgggaccggtggcggtgacgcacagactggggacgggggtcgtgaggaagaacttgagggtgcccccgccgacctgcagtcgccggagcaccgcccgcatgctgcaatcgtcgacgaccacagagaaggtgcgatgggtattttccccgtacaccgtcttggcgttcgcggcggcctggcccgccttggtgagcgcgttggacaggatctggacctgggtgctggtgctggacgacacgccctcctcgcgggcagcaaaggtgacgcaggtactcgtggtgaacacggaaaatttgccgttaaccccgagctcgaacgtggtgggcgtggcactatcggccccggtcgcgttaaggaccttggtgagctgcggcctcgtcaggcgcaactgaacgtcgggggttccctggggaaccagcaccacaaagctcgtcagttcgcgcttcatcagcgtctcgctggctagctcaacggcctcgccgtcggacgtcgtcgtccatatgcgctgaaccagcgtgcgaaacggggcctggcccgtgatcgccaactccacccgacgtaggtccgggtactggttggcgcgaaacacgctcaggagggagcgcttctggtccacgagagacaggaacgccgccgtgggtccgcgccagcgataccgactgaattgcgagtgttccaggggcaggaacacctgctccccaaagatcgtgttatggataaggatgccccggtcgcccataaccagaagcgagtccagaaggctcgtgcgcagcggggcaaacgcctgtaggattccattaagttcggcgccctgcaggaccacctggcagggcgccccctcctccggctgcccgagggacgcgtccgacgcgtcctccacgggggaggcgggggccacaccgccaggggaatccgtcggtccaggattctcttcgacatctccggcttgtttcagcagagagaagtttgttgctccactgccgaattctgctagagtatcaaaggctctatgcaacattcgacgagtttcctccgccgtagcgccggcacccaccgccccgaaccctgcggtccggagccgcgcggccacgtcgtccggggggtgccacacttcgggaataaacctttttaacagactctcggtgatcttggcgttattcccaaacagggccttgaatgtcacgcacgccgcccccaacaggtgggagaagtaatagtccgtgttcagggcgacgccgtgggcaatggcgtatgcgggatcctcggccagctcggacaccagcagcttgcggggcttggacgcgcctcccggggggtcggcaggcgacggcgtctcccgggggcgcttggccggggagggcagggccgcggggggggcgggctcgtcccctggggcggcggcgtctagctcgcggagggcggccagccgcgcgaccgtctcctctacctcgcgggtctgggccacgatcacgtacgggatccggtccttgatggacgggacctgcgcgcggcgggccatgagcttgtaatacaccgtcaggtgggccaggcgcttgttggtgtacgcgcgcgggtgtctgctcagttcggcggtgaggacaaagtcctggatgtccctctccgggtcggtgatgcgccgatgggcgtctacgaggacggccccgaacgcctgcagtccctcgggcaggggtcgcgccagccactcctccgcggggcgctcggctaacgccgcggcggctccggagacggtatcgtcgtaaaacagcaggtcgaccagggccctggaggtgcggttgataaacgcgcagttgtttttgcgcaccagatccacgcccttgatgagcatcttacccccgtagatgacgccgatgtactttttcttggcgatcagcagcagcttggtgaacgtcttttcgcactcgagtttgatggggggcagaaacagcgcgcgcgagatgtggctcgccatcttgtcgcccacggccgtcagcccggcggccgtgaggccgcggcacagcacaaagatggagtccgtgtccccgtagatgatgcgcatggaatagggcccgggggcgcgcatgtcggccgcctccgggaaatcggccaggagctgttcgaaggccgcccagcgcgcgtggacgtactcgcgggtcgcgagcagcatctcgcggccgatggtcgtcaccgtcgcggcaacgtgcaggcacggcaggagtccgtgctgcactcccgtgaacccgtacaccgagttacacacgaccttgatggcggcctgctgcttgtccaggagcacggcctcctcggggctgctctggggaatccgcgagcggatctgctttcgcatggcgagccagtcccgcaggaggatgctgaggaggctctctcgcacgtgagccttgacgaagaacagccgtcgcccccccacctcgatctccaggtagtccttgcccgcctccaggtgcgccactgcgtcggccctcagggagagcgtgctgaagcacaggttgtgggcctggatgatgctggggtacaggctggcaaagtcgaacaccaccacggggttcacgtgaaacccggaagtggggtcaaggaccctggccccctggtaccccacgtgcctgccggcggtctcccgcgcgccctccggctcccgctcgcccccgccctcctcgcgttcgtcctcgtcctccccctcctcctctggccgctcctcgtcctcccgggctgcggccggacgcttgggcgcctcccccccggcgcccctaaatcgcccctgggtgtccggcagaataaagcccttctggtcggccaggcgcagcaggcacgtaaagacgcggatctgctggccgtcgtagatggtgcgggtgatgttaatacccgccaagcgcgcgacggccgagagctccagatggggcaaaaacttaaaaaacagctggcccaccagcagggaatcctgtatgcagtactcgccgatcaccccgcgttgcgcgggcccggcggcgtagtaggcggggatgtcgcgatagctcaggtccttcttcttgtccttcaggacggcttcggccacggcgttgagcttgtagctcgagagcttgatcttgtcggttataatcccgtacatgtcgatgttcaccatgccgttcacctttatcttgctgcgcttctggaagtggctctggcctatgtcccacacgcgaaacacgccccggccgttcatgcggccgtacccgtccagggggaccttgtaaatgtccgtcagcttggccagcaagaagggccagtcgaagttgatgatgttgtacccggtcacgaactcggggccgtactgtttcacaagggtcatgaaggccaacagcatctcgaattcgctgtcgaattccagaaccacgggcgtgggcaggcccctggccgccagctcgttcaggtgggattcggggaggtcgcaggaaccgagcgaaaacaggaggacgtgctccagggcggtggtggacaggtcgtagagcagacaggatatctggatgaccaggtcctccgggtgcccggccaccggaaaggccagctcgtcctccccccccgccttgcattcgatatcgaagcacatgagcttgtatgccggtaggtcgctcatgcccccctcgatggccaggttgtccgccgtacagttaaactcgacgtcgctggatgtcccgaaggccatcggggcccgcggctgggctagcgtgttgttccggcccggtttgagacggtaccagccgaaggtgacgaacccggggttgtccaggatgaaccgggtggtggcgtcgaccccaccctcgtacttcttgatggccgggcagaagttgtcgcacaggtacgacagcacgcgcccgcttcggacgtagacgcggtaaaacagagcggggcgcgtctcgtagtagtacacgtcggtgcgctccaccacctccgcctcgaagtggtccgcggagatgccgcggaacgacgcgcccggggactcgcgcagggccgcggccatgcgctcgcagagatctcgtggggcgcggcattgtaggtgcctgtcgacctcctccttgttcatgtaaaagtactgccgcgtgccgtaaacgtgaacggccacccggtggccttccggagtcaggcccaggagcgtgatgacggtccccgtcggtgtgatggcgtccataaaccgcgcgtggaactgggccgcgcgcatgccgtacgcgtgctccacgttctccaggatgtcgtacacgtgaaagacggtgacggtggggttgaaccccgccggggcgtggtccacgccgccccacaggcgcgagcgccgcggccagaagccgcccgacccgacgcggaggacgtcgcgctcgtcccccccgcagtacaccttgggggcgcgcttgaggtgaccgtcgtgcaccccggcgcgcttctccgggggggcatcctcgtccagcacccgcggggcgatgaatcgaaattcatcgcattcgctatagtacgtatggcgctgggttggcccggtcggcttctgttgcgtcccgactggggcgaggtaggggttgtaaaagttttgcctcaaacaaggcgggggtccccggctggctccgcgagggccggcgggcgcaaaaaacccggacgccgccctggccgccgactttcctccgggggacagcgggccgccgccaccggaaaacatggtggctttaccaacagtaccggtggatcgggcccgcggtgcgccggcgtttgcaaaagcctaggcctccaaaaaagcctcctcactacttctggaatagctcagaggccgaggcggcctcggcctctgcataaataaaaaaaattagtcagccatggggcggagaatgggcggaactgggcggagttaggggcgggatgggcggagttaggggcgggactatggttgctgactaattgagatgcatgctttgcatacttctgcctgctggggagcctggggactttccacacctggttgctgactaattgagatgcatgctttgcatacttctgcctgctggggagcctggggactttccacaccctaactgacacacatttaaatgaagatatggtgcactctcagtacaatctgctctgatgccgcatagttaagccagccccgacacccgccaacacccgctgacgcgccctgacgggcttgtctgctcccggcatccgcttacagacaagctgtgaccgtctccgggagctgcatgtgtcagaggttttcaccgtcatcaccgaaacgcgcga

SEQ ID NO: 101 - DNA, 17003 bp, Artificial Sequence
  Description of Artificial Sequence: Synthetic polynucleotide
tgcagctctggcccgtgtctcaaaatctctgatgttacattgcacaagataaaaatatatcatcatgaacaataaaactgtctgcttacataaacagtaatacaaggggtgttatgagccatattcaacgggaaacgtcgaggccgcgattaaattccaacatggatgctgatttatatgggtataaatgggctcgcgataatgtcgggcaatcaggtgcgacaatctatcgcttgtatgggaagcccgatgcgccagagttgtttctgaaacatggcaaaggtagcgttgccaatgatgttacagatgagatggtcagactaaactggctgacggaatttatgcctcttccgaccatcaagcattttatccgtactcctgatgatgcatggttactcaccactgcgatccccggaaaaacagcattccaggtattagaagaatatcctgattcaggtgaaaatattgttgatgcgctggcagtgttcctgcgccggttgcattcgattcctgtttgtaattgtccttttaacagcgatcgcgtatttcgtctcgctcaggcgcaatcacgaatgaataacggtttggttgatgcgagtgattttgatgacgagcgtaatggctggcctgttgaacaagtctggaaagaaatgcataaacttttgccattctcaccggattcagtcgtcactcatggtgatttctcacttgataaccttatttttgacgaggggaaattaataggttgtattgatgttggacgagtcggaatcgcagaccgataccaggatcttgccatcctatggaactgcctcggtgagttttctccttcattacagaaacggctttttcaaaaatatggtattgataatcctgatatgaataaattgcagtttcatttgatgctcgatgagtttttctaatcagaattggttaattggttgtaacattattcagattgggcttgatttaaaacttcatttttaatttaaaaggatctaggtgaagatcctttttgataatctcatgaccaaaatcccttaacgtgagttttcgttccactgagcgtcagaccccgtagaaaagatcaaaggatcttcttgagatcctttttttctgcgcgtaatctgctgcttgcaaacaaaaaaaccaccgctaccagcggtggtttgtttgccggatcaagagctaccaactctttttccgaaggtaactggcttcagcagagcgcagataccaaatactgttcttctagtgtagccgtagttaggccaccacttcaagaactctgtagcaccgcctacatacctcgctctgctaatcctgttaccagtggctgctgccagtggcgataagtcgtgtcttaccgggttggactcaagacgatagttaccggataaggcgcagcggtcgggctgaacggggggttcgtgcacacagcccagcttggagcgaacgacctacaccgaactgagatacctacagcgtgagctatgagaaagcgccacgcttcccgaagggagaaaggcggacaggtatccggtaagcggcagggtcggaacaggagagcgcacgagggagcttccagggggaaacgcctggtatctttatagtcctgtcgggtttcgccacctctgacttgagcgtcgatttttgtgatgctcgtcaggggggcggagcctatggaaaaacgccagcaacgcggcctttttacggttcctggccttttgctggccttttgctcacatgttctttcctgcgttatcccctgattctgtggataaccgtattaccgcctttgagtgagctgataccgctcgccgcagccgaacgaccgagcgcagcgagtcagtgagcgaggaagcggaagagcgcccaatacgcaaaccgcctctccccgcgcgttggccgattcattaatgcagctggcacgacaggtttcccgactggaaagcgggcagtgagcgcaacgcaattaatgtgagttagctcactcattaggcaccccaggctttacactttatgcttccggctcgtatgttgtgtggaattgtgagcggataacaatttcacacaggaaacagctatgaccatgattacaccaagcttgcatgcaggcctatccgtagatgtacctggacatccaggtgatgccggcggcggtggtggaggcgcgcggaaagtcgcggacgcggttccagatgttgcgcagcggcaaaaagtgctccatggtcgggacgctctggccggtgaggcgtgcgcagtcgttgacgctctagaccgtgcaaaaggagagcctgtaagcgggcactcttccgtggtctggtggataaattcgcaagggtatcatggcggacgaccggggttcgaaccccggatccggccgtccgccgtgatccatgcggttaccgcccgcgtgtcgaacccaggtgtgcgacgtcagacaacgggggagcgctccttttggcttccttccaggcgcggcggctgctgcgctagcttttttggccactggccgcgcgcggcgtaagcggttaggctggaaagcgaaagcattaagtggctcgctccctgtagccggagggttattttccaagggttgagtcgcaggacccccggttcgagtctcgggccggccggactgcggcgaacgggggtttgcctccccgtcatgcaagaccccgcttgcaaattcctccggaaacagggacgagccccttttttgcttttcccagatgcatccggtgctgcggcagatgcgcccccctcctcagcagcggcaagagcaagagcagcggcagacatgcagggcaccctccccttctcctaccgcgtcaggaggggcaacatcgatccagacatgataagatacattgatgagtttggacaaaccacaactagaatgcagtgaaaaaaatgctttatttgtgaaatttgtgatgctattgctttatttgtaaccattataagctgcaataaacaagtttgtacactctcgggtgattatttacccccacccttgccgtctgcgccgtttaaaaatcaaaggggttctgccgcgcatcgctatgcgccactggcagggacacgttgcgatactggtgtttagtgctccacttaaactcaggcacaaccatccgcggcagctcggtgaagttttcactccacaggctgcgcaccatcaccaacgcgtttagcaggtcgggcgccgatatcttgaagtcgcagttggggcctccgccctgcgcgcgcgagttgcgatacacagggttgcagcactggaacactatcagcgccgggtggtgcacgctggccagcacgctcttgtcggagatcagatccgcgtccaggtcctccgcgttgctcagggcgaacggagtcaactttggtagctgccttcccaaaaagggcgcgtgcccaggctttgagttgcactcgcaccgtagtggcatcaaaaggtgaccgtgcccggtctgggcgttaggatacagcgcctgcataaaagccttgatctgcttaaaagccacctgagcctttgcgccttcagagaagaacatgccgcaagacttgccggaaaactgattggccggacaggccgcgtcgtgcacgcagcaccttgcgtcggtgttggagatctgcaccacatttcggccccaccggttcttcacgatcttggccttgctagactgctccttcagcgcgcgctgcccgttttcgctcgtcacatccatttcaatcacgtgctccttatttatcataatgcttccgtgtagacacttaagctcgccttcgatctcagcgcagcggtgcagccacaacgcgcagcccgtgggctcgtgatgcttgtaggtcacctctgcaaacgactgcaggtacgcctgcaggaatcgccccatcatcgtcacaaaggtcttgttgctggtgaaggtcagctgcaacccgcggtgctcctcgttcagccaggtcttgcatacggccgccagagcttccacttggtcaggcagtagtttgaagttcgcctttagatcgttatccacgtggtacttgtccatcagcgcgcgcgcagcctccatgcccttctcccacgcagacacgatcggcacactcagcgggttcatcaccgtaatttcactttccgcttcgctgggctcttcctcttcctcttgcgtccgcataccacgcgccactgggtcgtcttcattcagccgccgcactgtgcgcttacctcctttgccatgcttgattagcaccggtgggttgctgaaacccaccatttgtagcgccacatcttctctttcttcctcgctgtccacgattacctctggtgatggcgggcgctcgggcttgggagaagggcgcttctttttcttcttgggcgcaatggccaaatccgccgccgaggtcgatggccgcgggctgggtgtgcgcggcaccagcgcgtcttgtgatgagtcttcctcgtcctcggactcgatacgccgcctcatccgcttttttgggggcgcccggggaggcggcggcgacggggacggggacgacacgtcctccatggttgggggacgtcgcgccgcaccgcgtccgcgctcgggggtggtttcgcgctgctcctcttcccgactggccatttccttctcctataggcagaaaaagatcatggagtcagtcgagaagaaggacagcctaaccgccccctctgagttcgccaccaccgcctccaccgatgccgccaacgcgcctaccaccttccccgtcgaggcacccccgcttgaggaggaggaagtgattatcgagcaggacccaggttttgtaagcgaagacgacgaggaccgctcagtaccaacagaggataaaaagcaagaccaggacaacgcagaggcaaacgaggaacaagtcgggcggggggacgaaaggcatggcgactacctagatgtgggagacgacgtgctgttgaagcatctgcagcgccagtgcgccattatctgcgacgcgttgcaagagcgcagcgatgtgcccctcgccatagcggatgtcagccttgcctacgaacgccacctattctcaccgcgcgtaccccccaaacgccaagaaaacggcacatgcgagcccaacccgcgcctcaacttctaccccgtatttgccgtgccagaggtgcttgccacctatcacatctttttccaaaactgcaagatacccctatcctgccgtgccaaccgcagccgagcggacaagcagctggccttgcggcagggcgctgtcatacctgatatcgcctcgctcaacgaagtgccaaaaatctttgagggtcttggacgcgacgagaagcgcgcggcaaacgctctgcaacaggaaaacagcgaaaatgaaagtcactctggagtgttggtggaactcgagggtgacaacgcgcgcctagccgtactaaaacgcagcatcgaggtcacccactttgcctacccggcacttaacctaccccccaaggtcatgagcacagtcatgagtgagctgatcgtgcgccgtgcgcagcccctggagagggatgcaaatttgcaagaacaaacagaggagggcctacccgcagttggcgacgagcagctagcgcgctggcttcaaacgcgcgagcctgccgacttggaggagcgacgcaaactaatgatggccgcagtgctcgttaccgtggagcttgagtgcatgcagcggttctttgctgacccggagatgcagcgcaagctagaggaaacattgcactacacctttcgacagggctacgtacgccaggcctgcaagatctccaacgtggagctctgcaacctggtctcctaccttggaattttgcacgaaaaccgccttgggcaaaacgtgcttcattccacgctcaagggcgaggcgcgccgcgactacgtccgcgactgcgtttacttatttctatgctacacctggcagacggccatgggcgtttggcagcagtgcttggaggagtgcaacctcaaggagctgcagaaactgctaaagcaaaacttgaaggacctatggacggccttcaacgagcgctccgtggccgcgcacctggcggacatcattttccccgaacgcctgcttaaaaccctgcaacagggtctgccagacttcaccagtcaaagcatgttgcagaactttaggaactttatcctagagcgctcaggaatcttgcccgccacctgctgtgcacttcctagcgactttgtgcccattaagtaccgcgaatgccctccgccgctttggggccactgctaccttctgcagctagccaactaccttgcctaccactctgacataatggaagacgtgagcggtgacggtctactggagtgtcactgtcgctgcaacctatgcaccccgcaccgctccctggtttgcaattcgcagctgcttaacgaaagtcaaattatcggtacctttgagctgcagggtccctcgcctgacgaaaagtccgcggctccggggttgaaactcactccggggctgtggacgtcggcttaccttcgcaaatttgtacctgaggactaccacgcccacgagattaggttctacgaagaccaatcccgcccgcctaatgcggagcttaccgcctgcgtcattacccagggccacattcttggccaattgcaagccatcaacaaagcccgccaagagtttctgctacgaaagggacggggggtttacttggacccccagtccggcgaggagctcaacccaatccccccgccgccgcagccctatcagcagcagccgcgggcccttgcttcccaggatggcacccaaaaagaagctgcagctgccgccgccacccacggacgaggaggaatactgggacagtcaggcagaggaggttttggacgaggaggaggaggacatgatggaagactgggagagcctagacgaggaagcttccgaggtcgaagaggtgtcagacgaaacaccgtcaccctcggtcgcattcccctcgccggcgccccagaaatcggcaaccggttccagcatggctacaacctccgctcctcaggcgccgccggcactgcccgttcgccgacccaaccgtagatgggacaccactggaaccagggccggtaagtccaagcagccgccgccgttagcccaagagcaacaacagcgccaaggctaccgctcatggcgcgggcacaagaacgccatagttgcttgcttgcaagactgtgggggcaacatctccttcgcccgccgctttcttctctaccatcacggcgtggccttcccccgtaacatcctgcattactaccgtcatctctacagcccatactgcaccggcggcagcggcagcaacagcagcggccacacagaagcaaaggcgaccggatagcaagactctgacaaagcccaagaaatccacagcggcggcagcagcaggaggaggagcgctgcgtctggcgcccaacgaacccgtatcgacccgcgagcttagaaacaggatttttcccactctgtatgctatatttcaacagagcaggggccaagaacaagagctgaaaataaaaaacaggtctctgcgatccctcacccgcagctgcctgtatcacaaaagcgaagatcagcttcggcgcacgctggaagacgcggaggctctcttcagtaaatactgcgcgctgactcttaaggactagtttcgcgccctttctcaaatttaagcgcgaaaactacgtcatctccagcggccacacccggcgccagcacctgttgtcagcgccattatgagcaaggaaattcccacgccctacatgtggagttaccagccacaaatgggacttgcggctggagctgcccaagactactcaacccgaataaactacatgagcgcggggcggccgcaacttgtttattgcagcttataatggttacaaataaagcaatagcatcacaaatttcacaaataaagcatttttttcactgcattctagttgtggtttgtccaaactcatcaatgtatcttagcttaacgggcggcgaaggagaagtccacgcctacatgggggtagagtcataatcgtgcatcaggatagggcggtggtgctgcagcagcgcgcgaataaactgctgccgccgccgctccgtcctgcaggaatacaacatggcagtggtctcctcagcgatgattcgcaccgcccgcagcataaggcgccttgtcctccgggcacagcagcgcaccctgatctcacttaaatcagcacagtaactgcagcacagcaccacaatattgttcaaaatcccacagtgcaaggcgctgtatccaaagctcatggcggggaccacagaacccacgtggccatcataccacaagcgcaggtagattaagtggcgacccctcataaacacgctggacataaacattacctcttttggcatgttgtaattcaccacctcccggtaccatataaacctctgattaaacatggcgccatccaccaccatcctaaaccagctggccaaaacctgcccgccggctatacactgcagggaaccgggactggaacaatgacagtggagagcccaggactcgtaaccatggatcatcatgctcgtcatgatatcaatgttggcacaacacaggcacacgtgcatacacttcctcaggattacaagctcctcccgcgttagaaccatatcccagggaacaacccattcctgaatcagcgtaaatcccacactgcagggaagacctcgcacgtaactcacgttgtgcattgtcaaagtgttacattcgggcagcagcggatgatcctccagtatggtagcgcgggtttctgtctcaaaaggaggtagacgatccctactgtacggagtgcgccgagacaaccgagatcgtgttggtcgtagtgtcatgccaaatggaacgccggacgtagtcatatttcctgaagcaaaaccaggtgcgggcgtgacaaacagatctgcgtctccggtctcgccgcttagatcgctctgtgtagtagttgtagtatatccactctctcaaagcatccaggcgccccctggcttcgggttctatgtaaactccttcatgcgccgctgccctgataacatccaccaccgcagaataagccacacccagccaacctacacattcgttctgcgagtcacacacgggaggagcgggaagagctggaagaaccatgtttttttttttattccaaaagattatccaaaacctcaaaatgaagatctattaagtgaacgcgctcccctccggtggcgtggtcaaactctacagccaaagaacagataatggcatttgtaagatgttgcacaatggcttccaaaaggcaaacggccctcacgtccaagtggacgtaaaggctaaacccttcagggtgaatctcctctataaacattccagcaccttcaaccatgcccaaataattctcatctcgccaccttctcaatatatctctaagcaaatcccgaatattaagtccggccattgtaaaaatctgctccagagcgccctccaccttcagcctcaagcagcgaatcatgattgcaaaaattcaggttcctcacagacctgtataagattcaaaagcggaacattaacaaaaataccgcgatcccgtaggtcccttcgcagggccagctgaacataatcgtgcaggtctgcacggaccagcgcggccacttccccgccaggaaccatgacaaaagaacccacactgattatgacacgcatactcggagctatgctaaccagcgtagccccgatgtaagcttgttgcatgggcggcgatataaaatgcaaggtgctgctcaaaaaatcaggcaaagcctcgcgcaaaaaagaaagcacatcgtagtcatgctcatgcagataaaggcaggtaagctccggaaccaccacagaaaaagacaccatttttctctcaaacatgtctgcgggtttctgcataaacacaaaataaaataacaaaaaaacatttaaacattagaagcctgtcttacaacaggaaaaacaacccttataagcataagacggactacggccatgccggcgtgaccgtaaaaaaactggtcaccgtgattaaaaagcaccaccgacagctcctcggtcatgtccggagtcataatgtaagactcggtaaacacatcaggttgattcacatcggtcagtgctaaaaagcgaccgaaatagcccgggggaatacatacccgcaggcgtagagacaacattacagcccccataggaggtataacaaaattaataggagagaaaaacacataaacacctgaaaaaccctcctgcctaggcaaaatagcaccctcccgctccagaacaacatacagcgcttccacagcggcagccataacagtcagccttaccagtaaaaaagaaaacctattaaaaaaacaccactcgacacggcaccagctcaatcagtcacagtgtaaaaaagggccaagtgcagagcgagtatatataggactaaaaaatgacgtaacggttaaagtccacaaaaaacacccagaaaaccgcacgcgaacctacgcccagaaacgaaagccaaaaaacccacaacttcctcaaatcgtcacttccgttttcccacgttacgtcacttcccattttaagaaaactacaattcccaacacatacaagttactccgcccttaattaaatcggatccgatatctagatgtattcgcgaggtaccgagctcgaattctctggccgtcgttttacaacgtcgtgactgggaaaaccctggcgttacccaacttaatcgccttgcagcacatccccctttcgccagctggcgtaatagcgaagaggcccgcaccgatcgcccttcccaacagttgcgcagcctgaatggcgaatggcgcctgatgcggtattttctccttacgcatctgtgcggtatttcacaccgcatatcttcatttaaatgtgtgtcagttagggtgtggaaagtccccaggctccccagcaggcagaagtatgcaaagcatgcatctcaattagtcagcaaccaggtgtggaaagtccccaggctccccagcaggcagaagtatgcaaagcatgcatctcaattagtcagcaaccatagtcccgcccctaactccgcccatcccgcccctaactccgcccagttccgcccattctccgccccatggctgactaattttttttatttatgcagaggccgaggccgcctcggcctctgagctattccagaagtagtgaggaggcttttttggaggcctaggcttttgcaaacgccggcgcaccgcgggcccgatccaccggtactgttggtaaagccaccatgttttccggtggcggcggcccgctgtcccccggaggaaagtcggcggccagggcggcgtccgggttttttgcgcccgccggccctcgcggagccagccggggacccccgccttgtttgaggcaaaacttttacaacccctacctcgccccagtcgggacgcaacagaagccgaccgggccaacccagcgccatacgtactatagcgaatgcgatgaatttcgattcatcgccccgcgggtgctggacgaggatgcccccccggagaagcgcgccggggtgcacgacggtcacctcaagcgcgcccccaaggtgtactgcgggggggacgagcgcgacgtcctccgcgtcgggtcgggcggcttctggccgcggcgctcgcgcctgtggggcggcgtggaccacgccccggcggggttcaaccccaccgtcaccgtctttcacgtgtacgacatcctggagaacgtggagcacgcgtacggcatgcgcgcggcccagttccacgcgcggtttatggacgccatcacaccgacggggaccgtcatcacgctcctgggcctgactccggaaggccaccgggtggccgttcacgtttacggcacgcggcagtacttttacatgaacaaggaggaggtcgacaggcacctacaatgccgcgccccacgagatctctgcgagcgcatggccgcggccctgcgcgagtccccgggcgcgtcgttccgcggcatctccgcggaccacttcgaggcggaggtggtggagcgcaccgacgtgtactactacgagacgcgccccgctctgttttaccgcgtctacgtccgaagcgggcgcgtgctgtcgtacctgtgcgacaacttctgcccggccatcaagaagtacgagggtggggtcgacgccaccacccggttcatcctggacaaccccgggttcgtcaccttcggctggtaccgtctcaaaccgggccggaacaacacgctagcccagccgcgggccccgatggccttcgggacatccagcgacgtcgagtttaactgtacggcggacaacctggccatcgaggggggcatgagcgacctaccggcatacaagctcatgtgcttcgatatcgaatgcaaggcggggggggaggacgagctggcctttccggtggccgggcacccggaggacctggtcatccagatatcctgtctgctctacgacctgtccaccaccgccctggagcacgtcctcctgttttcgctcggttcctgcgacctccccgaatcccacctgaacgagctggcggccaggggcctgcccacgcccgtggttctggaattcgacagcgaattcgagatgctgttggccttcatgacccttgtgaaacagtacggccccgagttcgtgaccgggtacaacatcatcaacttcgactggcccttcttgctggccaagctgacggacatttacaaggtccccctggacgggtacggccgcatgaacggccggggcgtgtttcgcgtgtgggacataggccagagccacttccagaagcgcagcaagataaaggtgaacggcatggtgaacatcgacatgtacgggattataaccgacaagatcaagctctcgagctacaagctcaacgccgtggccgaagccgtcctgaaggacaagaagaaggacctgagctatcgcgacatccccgcctactacgccgccgggcccgcgcaacgcggggtgatcggcgagtactgcatacaggattccctgctggtgggccagctgttttttaagtttttgccccatctggagctctcggccgtcgcgcgcttggcgggtattaacatcacccgcaccatctacgacggccagcagatccgcgtctttacgtgcctgctgcgcctggccgaccagaagggctttattctgccggacacccaggggcgatttaggggcgccgggggggaggcgcccaagcgtccggccgcagcccgggaggacgaggagcggccagaggaggagggggaggacgaggacgaacgcgaggagggcgggggcgagcgggagccggagggcgcgcgggagaccgccggcaggcacgtggggtaccagggggccagggtccttgaccccacttccgggtttcacgtgaaccccgtggtggtgttcgactttgccagcctgtaccccagcatcatccaggcccacaacctgtgcttcagcacgctctccctgagggccgacgcagtggcgcacctggaggcgggcaaggactacctggagatcgaggtgggggggcgacggctgttcttcgtcaaggctcacgtgcgagagagcctcctcagcatcctcctgcgggactggctcgccatgcgaaagcagatccgctcgcggattccccagagcagccccgaggaggccgtgctcctggacaagcagcaggccgccatcaaggtcgtgtgtaactcggtgtacgggttcacgggagtgcagcacggactcctgccgtgcctgcacgttgccgcgacggtgacgaccatcggccgcgagatgctgctcgcgacccgcgagtacgtccacgcgcgctgggcggccttcgaacagctcctggccgatttcccggaggcggccgacatgcgcgcccccgggccctattccatgcgcatcatctacggggacacggactccatctttgtgctgtgccgcggcctcacggccgccgggctgacggccgtgggcgacaagatggcgagccacatctcgcgcgcgctgtttctgccccccatcaaactcgagtgcgaaaagacgttcaccaagctgctgctgatcgccaagaaaaagtacatcggcgtcatctacgggggtaagatgctcatcaagggcgtggatctggtgcgcaaaaacaactgcgcgtttatcaaccgcacctccagggccctggtcgacctgctgttttacgacgataccgtctccggagccgccgcggcgttagccgagcgccccgcggaggagtggctggcgcgacccctgcccgagggactgcaggcgttcggggccgtcctcgtagacgcccatcggcgcatcaccgacccggagagggacatccaggactttgtcctcaccgccgaactgagcagacacccgcgcgcgtacaccaacaagcgcctggcccacctgacggtgtattacaagctcatggcccgccgcgcgcaggtcccgtccatcaaggaccggatcccgtacgtgatcgtggcccagacccgcgaggtagaggagacggtcgcgcggctggccgccctccgcgagctagacgccgccgccccaggggacgagcccgccccccccgcggccctgccctccccggccaagcgcccccgggagacgccgtcgcctgccgaccccccgggaggcgcgtccaagccccgcaagctgctggtgtccgagctggccgaggatcccgcatacgccattgcccacggcgtcgccctgaacacggactattacttctcccacctgttgggggcggcgtgcgtgacattcaaggccctgtttgggaataacgccaagatcaccgagagtctgttaaaaaggtttattcccgaagtgtggcaccccccggacgacgtggccgcgcggctccggaccgcagggttcggggcggtgggtgccggcgctacggcggaggaaactcgtcgaatgttgcatagagcctttgatactctagcagaattcggcagtggagcaacaaacttctctctgctgaaacaagccggagatgtcgaagagaatcctggaccgacggattcccctggcggtgtggcccccgcctcccccgtggaggacgcgtcggacgcgtccctcgggcagccggaggagggggcgccctgccaggtggtcctgcagggcgccgaacttaatggaatcctacaggcgtttgccccgctgcgcacgagccttctggactcgcttctggttatgggcgaccggggcatccttatccataacacgatctttggggagcaggtgttcctgcccctggaacactcgcaattcagtcggtatcgctggcgcggacccacggcggcgttcctgtctctcgtggaccagaagcgctccctcctgagcgtgtttcgcgccaaccagtacccggacctacgtcgggtggagttggcgatcacgggccaggccccgtttcgcacgctggttcagcgcatatggacgacgacgtccgacggcgaggccgttgagctagccagcgagacgctgatgaagcgcgaactgacgagctttgtggtgctggttccccagggaacccccgacgttcagttgcgcctgacgaggccgcagctcaccaaggtccttaacgcgaccggggccgatagtgccacgcccaccacgttcgagctcggggttaacggcaaattttccgtgttcaccacgagtacctgcgtcacctttgctgcccgcgaggagggcgtgtcgtccagcaccagcacccaggtccagatcctgtccaacgcgctcaccaaggcgggccaggccgccgcgaacgccaagacggtgtacggggaaaatacccatcgcaccttctctgtggtcgtcgacgattgcagcatgcgggcggtgctccggcgactgcaggtcggcgggggcaccctcaagttcttcctcacgacccccgtccccagtctgtgcgtcaccgccaccggtcccaacgcggtatcggcggtatttctcctgaaaccccagaagatttgcctggactggctgggtcatagccaggggtctccttcagccgggagctcggcctcccgggcctctgggagcgagccaacagacagccaggactccgcgtcggacgcggtcagccacggcgatccggaagacctcgatggcgctgcccgggcgggagaggcgggggccttgcatgcctgtccgatgccgtcgtcgaccacgcgggtcactcccacgaccaagcgggggcgctcggggggcgaggatgcgcgcgcggacacggccctaaagaaacctaagacggggtcgcccaccgcacccccgcccgcagatccagtccccctggacacggaggacgactccgatgcggcggacgggacggcggcccgtcccgccgctccagacgcccggagcggaagccgttacgcgtgttactttcgcgacctcccgaccggagaagcaagccccggcgccttctccgccttccgggggggcccccaaaccccgtatggttttggattcccctgataggatccgactgcaggtagctgtgccttctagttgccagccatctgttgtttgcccctcccccgtgccttccttgaccctggaaggtgccactcccactgtcctttcctaataaaatgaggaaattgcatcgcattgtctgagtaggtgtcattctattctggggggtggggtggggcaggacagcaagggggaggattgggaagacaatagcaggcatgctggggatgcggtgggctctatgggttttatggtgcactctcagtacaatctgctctgatgccgcatagttaagccagccccgacacccgccaacacccgctgacgcgccctgacgggcttgtctgctcccggcatccgcttacagacaagctgtgaccgtctccgggagctgcatgtgtcagaggttttcaccgtcatcaccgaaacgcgcga

SEQ ID NO: 102 - DNA, 17003 bp, Artificial Sequence
  Description of Artificial Sequence: Synthetic polynucleotide
tgcagctctggcccgtgtctcaaaatctctgatgttacattgcacaagataaaaatatatcatcatgaacaataaaactgtctgcttacataaacagtaatacaaggggtgttatgagccatattcaacgggaaacgtcgaggccgcgattaaattccaacatggatgctgatttatatgggtataaatgggctcgcgataatgtcgggcaatcaggtgcgacaatctatcgcttgtatgggaagcccgatgcgccagagttgtttctgaaacatggcaaaggtagcgttgccaatgatgttacagatgagatggtcagactaaactggctgacggaatttatgcctcttccgaccatcaagcattttatccgtactcctgatgatgcatggttactcaccactgcgatccccggaaaaacagcattccaggtattagaagaatatcctgattcaggtgaaaatattgttgatgcgctggcagtgttcctgcgccggttgcattcgattcctgtttgtaattgtccttttaacagcgatcgcgtatttcgtctcgctcaggcgcaatcacgaatgaataacggtttggttgatgcgagtgattttgatgacgagcgtaatggctggcctgttgaacaagtctggaaagaaatgcataaacttttgccattctcaccggattcagtcgtcactcatggtgatttctcacttgataaccttatttttgacgaggggaaattaataggttgtattgatgttggacgagtcggaatcgcagaccgataccaggatcttgccatcctatggaactgcctcggtgagttttctccttcattacagaaacggctttttcaaaaatatggtattgataatcctgatatgaataaattgcagtttcatttgatgctcgatgagtttttctaatcagaattggttaattggttgtaacattattcagattgggcttgatttaaaacttcatttttaatttaaaaggatctaggtgaagatcctttttgataatctcatgaccaaaatcccttaacgtgagttttcgttccactgagcgtcagaccccgtagaaaagatcaaaggatcttcttgagatcctttttttctgcgcgtaatctgctgcttgcaaacaaaaaaaccaccgctaccagcggtggtttgtttgccggatcaagagctaccaactctttttccgaaggtaactggcttcagcagagcgcagataccaaatactgttcttctagtgtagccgtagttaggccaccacttcaagaactctgtagcaccgcctacatacctcgctctgctaatcctgttaccagtggctgctgccagtggcgataagtcgtgtcttaccgggttggactcaagacgatagttaccggataaggcgcagcggtcgggctgaacggggggttcgtgcacacagcccagcttggagcgaacgacctacaccgaactgagatacctacagcgtgagctatgagaaagcgccacgcttcccgaagggagaaaggcggacaggtatccggtaagcggcagggtcggaacaggagagcgcacgagggagcttccagggggaaacgcctggtatctttatagtcctgtcgggtttcgccacctctgacttgagcgtcgatttttgtgatgctcgtcaggggggcggagcctatggaaaaacgccagcaacgcggcctttttacggttcctggccttttgctggccttttgctcacatgttctttcctgcgttatcccctgattctgtggataaccgtattaccgcctttgagtgagctgataccgctcgccgcagccgaacgaccgagcgcagcgagtcagtgagcgaggaagcggaagagcgcccaatacgcaaaccgcctctccccgcgcgttggccgattcattaatgcagctggcacgacaggtttcccgactggaaagcgggcagtgagcgcaacgcaattaatgtgagttagctcactcattaggcaccccaggctttacactttatgcttccggctcgtatgttgtgtggaattgtgagcggataacaatttcacacaggaaacagctatgaccatgattacaccaagcttgcatgcaggcctatccgtagatgtacctggacatccaggtgatgccggcggcggtggtggaggcgcgcggaaagtcgcggacgcggttccagatgttgcgcagcggcaaaaagtgctccatggtcgggacgctctggccggtgaggcgtgcgcagtcgttgacgctctagaccgtgcaaaaggagagcctgtaagcgggcactcttccgtggtctggtggataaattcgcaagggtatcatggcggacgaccggggttcgaaccccggatccggccgtccgccgtgatccatgcggttaccgcccgcgtgtcgaacccaggtgtgcgacgtcagacaacgggggagcgctccttttggcttccttccaggcgcggcggctgctgcgctagcttttttggccactggccgcgcgcggcgtaagcggttaggctggaaagcgaaagcattaagtggctcgctccctgtagccggagggttattttccaagggttgagtcgcaggacccccggttcgagtctcgggccggccggactgcggcgaacgggggtttgcctccccgtcatgcaagaccccgcttgcaaattcctccggaaacagggacgagccccttttttgcttttcccagatgcatccggtgctgcggcagatgcgcccccctcctcagcagcggcaagagcaagagcagcggcagacatgcagggcaccctccccttctcctaccgcgtcaggaggggcaacatcgatccagacatgataagatacattgatgagtttggacaaaccacaactagaatgcagtgaaaaaaatgctttatttgtgaaatttgtgatgctattgctttatttgtaaccattataagctgcaataaacaagtttgtacactctcgggtgattatttacccccacccttgccgtctgcgccgtttaaaaatcaaaggggttctgccgcgcatcgctatgcgccactggcagggacacgttgcgatactggtgtttagtgctccacttaaactcaggcacaaccatccgcggcagctcggtgaagttttcactccacaggctgcgcaccatcaccaacgcgtttagcaggtcgggcgccgatatcttgaagtcgcagttggggcctccgccctgcgcgcgcgagttgcgatacacagggttgcagcactggaacactatcagcgccgggtggtgcacgctggccagcacgctcttgtcggagatcagatccgcgtccaggtcctccgcgttgctcagggcgaacggagtcaactttggtagctgccttcccaaaaagggcgcgtgcccaggctttgagttgcactcgcaccgtagtggcatcaaaaggtgaccgtgcccggtctgggcgttaggatacagcgcctgcataaaagccttgatctgcttaaaagccacctgagcctttgcgccttcagagaagaacatgccgcaagacttgccggaaaactgattggccggacaggccgcgtcgtgcacgcagcaccttgcgtcggtgttggagatctgcaccacatttcggccccaccggttcttcacgatcttggccttgctagactgctccttcagcgcgcgctgcccgttttcgctcgtcacatccatttcaatcacgtgctccttatttatcataatgcttccgtgtagacacttaagctcgccttcgatctcagcgcagcggtgcagccacaacgcgcagcccgtgggctcgtgatgcttgtaggtcacctctgcaaacgactgcaggtacgcctgcaggaatcgccccatcatcgtcacaaaggtcttgttgctggtgaaggtcagctgcaacccgcggtgctcctcgttcagccaggtcttgcatacggccgccagagcttccacttggtcaggcagtagtttgaagttcgcctttagatcgttatccacgtggtacttgtccatcagcgcgcgcgcagcctccatgcccttctcccacgcagacacgatcggcacactcagcgggttcatcaccgtaatttcactttccgcttcgctgggctcttcctcttcctcttgcgtccgcataccacgcgccactgggtcgtcttcattcagccgccgcactgtgcgcttacctcctttgccatgcttgattagcaccggtgggttgctgaaacccaccatttgtagcgccacatcttctctttcttcctcgctgtccacgattacctctggtgatggcgggcgctcgggcttgggagaagggcgcttctttttcttcttgggcgcaatggccaaatccgccgccgaggtcgatggccgcgggctgggtgtgcgcggcaccagcgcgtcttgtgatgagtcttcctcgtcctcggactcgatacgccgcctcatccgcttttttgggggcgcccggggaggcggcggcgacggggacggggacgacacgtcctccatggttgggggacgtcgcgccgcaccgcgtccgcgctcgggggtggtttcgcgctgctcctcttcccgactggccatttccttctcctataggcagaaaaagatcatggagtcagtcgagaagaaggacagcctaaccgccccctctgagttcgccaccaccgcctccaccgatgccgccaacgcgcctaccaccttccccgtcgaggcacccccgcttgaggaggaggaagtgattatcgagcaggacccaggttttgtaagcgaagacgacgaggaccgctcagtaccaacagaggataaaaagcaagaccaggacaacgcagaggcaaacgaggaacaagtcgggcggggggacgaaaggcatggcgactacctagatgtgggagacgacgtgctgttgaagcatctgcagcgccagtgcgccattatctgcgacgcgttgcaagagcgcagcgatgtgcccctcgccatagcggatgtcagccttgcctacgaacgccacctattctcaccgcgcgtaccccccaaacgccaagaaaacggcacatgcgagcccaacccgcgcctcaacttctaccccgtatttgccgtgccagaggtgcttgccacctatcacatctttttccaaaactgcaagatacccctatcctgccgtgccaaccgcagccgagcggacaagcagctggccttgcggcagggcgctgtcatacctgatatcgcctcgctcaacgaagtgccaaaaatctttgagggtcttggacgcgacgagaagcgcgcggcaaacgctctgcaacaggaaaacagcgaaaatgaaagtcactctggagtgttggtggaactcgagggtgacaacgcgcgcctagccgtactaaaacgcagcatcgaggtcacccactttgcctacccggcacttaacctaccccccaaggtcatgagcacagtcatgagtgagctgatcgtgcgccgtgcgcagcccctggagagggatgcaaatttgcaagaacaaacagaggagggcctacccgcagttggcgacgagcagctagcgcgctggcttcaaacgcgcgagcctgccgacttggaggagcgacgcaaactaatgatggccgcagtgctcgttaccgtggagcttgagtgcatgcagcggttctttgctgacccggagatgcagcgcaagctagaggaaacattgcactacacctttcgacagggctacgtacgccaggcctgcaagatctccaacgtggagctctgcaacctggtctcctaccttggaattttgcacgaaaaccgccttgggcaaaacgtgcttcattccacgctcaagggcgaggcgcgccgcgactacgtccgcgactgcgtttacttatttctatgctacacctggcagacggccatgggcgtttggcagcagtgcttggaggagtgcaacctcaaggagctgcagaaactgctaaagcaaaacttgaaggacctatggacggccttcaacgagcgctccgtggccgcgcacctggcggacatcattttccccgaacgcctgcttaaaaccctgcaacagggtctgccagacttcaccagtcaaagcatgttgcagaactttaggaactttatcctagagcgctcaggaatcttgcccgccacctgctgtgcacttcctagcgactttgtgcccattaagtaccgcgaatgccctccgccgctttggggccactgctaccttctgcagctagccaactaccttgcctaccactctgacataatggaagacgtgagcggtgacggtctactggagtgtcactgtcgctgcaacctatgcaccccgcaccgctccctggtttgcaattcgcagctgcttaacgaaagtcaaattatcggtacctttgagctgcagggtccctcgcctgacgaaaagtccgcggctccggggttgaaactcactccggggctgtggacgtcggcttaccttcgcaaatttgtacctgaggactaccacgcccacgagattaggttctacgaagaccaatcccgcccgcctaatgcggagcttaccgcctgcgtcattacccagggccacattcttggccaattgcaagccatcaacaaagcccgccaagagtttctgctacgaaagggacggggggtttacttggacccccagtccggcgaggagctcaacccaatccccccgccgccgcagccctatcagcagcagccgcgggcccttgcttcccaggatggcacccaaaaagaagctgcagctgccgccgccacccacggacgaggaggaatactgggacagtcaggcagaggaggttttggacgaggaggaggaggacatgatggaagactgggagagcctagacgaggaagcttccgaggtcgaagaggtgtcagacgaaacaccgtcaccctcggtcgcattcccctcgccggcgccccagaaatcggcaaccggttccagcatggctacaacctccgctcctcaggcgccgccggcactgcccgttcgccgacccaaccgtagatgggacaccactggaaccagggccggtaagtccaagcagccgccgccgttagcccaagagcaacaacagcgccaaggctaccgctcatggcgcgggcacaagaacgccatagttgcttgcttgcaagactgtgggggcaacatctccttcgcccgccgctttcttctctaccatcacggcgtggccttcccccgtaacatcctgcattactaccgtcatctctacagcccatactgcaccggcggcagcggcagcaacagcagcggccacacagaagcaaaggcgaccggatagcaagactctgacaaagcccaagaaatccacagcggcggcagcagcaggaggaggagcgctgcgtctggcgcccaacgaacccgtatcgacccgcgagcttagaaacaggatttttcccactctgtatgctatatttcaacagagcaggggccaagaacaagagctgaaaataaaaaacaggtctctgcgatccctcacccgcagctgcctgtatcacaaaagcgaagatcagcttcggcgcacgctggaagacgcggaggctctcttcagtaaatactgcgcgctgactcttaaggactagtttcgcgccctttctcaaatttaagcgcgaaaactacgtcatctccagcggccacacccggcgccagcacctgttgtcagcgccattatgagcaaggaaattcccacgccctacatgtggagttaccagccacaaatgggacttgcggctggagctgcccaagactactcaacccgaataaactacatgagcgcggggcggccgcaacttgtttattgcagcttataatggttacaaataaagcaatagcatcacaaatttcacaaataaagcatttttttcactgcattctagttgtggtttgtccaaactcatcaatgtatcttagcttaacgggcggcgaaggagaagtccacgcctacatgggggtagagtcataatcgtgcatcaggatagggcggtggtgctgcagcagcgcgcgaataaactgctgccgccgccgctccgtcctgcaggaatacaacatggcagtggtctcctcagcgatgattcgcaccgcccgcagcataaggcgccttgtcctccgggcacagcagcgcaccctgatctcacttaaatcagcacagtaactgcagcacagcaccacaatattgttcaaaatcccacagtgcaaggcgctgtatccaaagctcatggcggggaccacagaacccacgtggccatcataccacaagcgcaggtagattaagtggcgacccctcataaacacgctggacataaacattacctcttttggcatgttgtaattcaccacctcccggtaccatataaacctctgattaaacatggcgccatccaccaccatcctaaaccagctggccaaaacctgcccgccggctatacactgcagggaaccgggactggaacaatgacagtggagagcccaggactcgtaaccatggatcatcatgctcgtcatgatatcaatgttggcacaacacaggcacacgtgcatacacttcctcaggattacaagctcctcccgcgttagaaccatatcccagggaacaacccattcctgaatcagcgtaaatcccacactgcagggaagacctcgcacgtaactcacgttgtgcattgtcaaagtgttacattcgggcagcagcggatgatcctccagtatggtagcgcgggtttctgtctcaaaaggaggtagacgatccctactgtacggagtgcgccgagacaaccgagatcgtgttggtcgtagtgtcatgccaaatggaacgccggacgtagtcatatttcctgaagcaaaaccaggtgcgggcgtgacaaacagatctgcgtctccggtctcgccgcttagatcgctctgtgtagtagttgtagtatatccactctctcaaagcatccaggcgccccctggcttcgggttctatgtaaactccttcatgcgccgctgccctgataacatccaccaccgcagaataagccacacccagccaacctacacattcgttctgcgagtcacacacgggaggagcgggaagagctggaagaaccatgtttttttttttattccaaaagattatccaaaacctcaaaatgaagatctattaagtgaacgcgctcccctccggtggcgtggtcaaactctacagccaaagaacagataatggcatttgtaagatgttgcacaatggcttccaaaaggcaaacggccctcacgtccaagtggacgtaaaggctaaacccttcagggtgaatctcctctataaacattccagcaccttcaaccatgcccaaataattctcatctcgccaccttctcaatatatctctaagcaaatcccgaatattaagtccggccattgtaaaaatctgctccagagcgccctccaccttcagcctcaagcagcgaatcatgattgcaaaaattcaggttcctcacagacctgtataagattcaaaagcggaacattaacaaaaataccgcgatcccgtaggtcccttcgcagggccagctgaacataatcgtgcaggtctgcacggaccagcgcggccacttccccgccaggaaccatgacaaaagaacccacactgattatgacacgcatactcggagctatgctaaccagcgtagccccgatgtaagcttgttgcatgggcggcgatataaaatgcaaggtgctgctcaaaaaatcaggcaaagcctcgcgcaaaaaagaaagcacatcgtagtcatgctcatgcagataaaggcaggtaagctccggaaccaccacagaaaaagacaccatttttctctcaaacatgtctgcgggtttctgcataaacacaaaataaaataacaaaaaaacatttaaacattagaagcctgtcttacaacaggaaaaacaacccttataagcataagacggactacggccatgccggcgtgaccgtaaaaaaactggtcaccgtgattaaaaagcaccaccgacagctcctcggtcatgtccggagtcataatgtaagactcggtaaacacatcaggttgattcacatcggtcagtgctaaaaagcgaccgaaatagcccgggggaatacatacccgcaggcgtagagacaacattacagcccccataggaggtataacaaaattaataggagagaaaaacacataaacacctgaaaaaccctcctgcctaggcaaaatagcaccctcccgctccagaacaacatacagcgcttccacagcggcagccataacagtcagccttaccagtaaaaaagaaaacctattaaaaaaacaccactcgacacggcaccagctcaatcagtcacagtgtaaaaaagggccaagtgcagagcgagtatatataggactaaaaaatgacgtaacggttaaagtccacaaaaaacacccagaaaaccgcacgcgaacctacgcccagaaacgaaagccaaaaaacccacaacttcctcaaatcgtcacttccgttttcccacgttacgtcacttcccattttaagaaaactacaattcccaacacatacaagttactccgcccttaattaaatcggatccgatatctagatgtattcgcgaggtaccgagctcgaattctctggccgtcgttttacaacgtcgtgactgggaaaaccctggcgttacccaacttaatcgccttgcagcacatccccctttcgccagctggcgtaatagcgaagaggcccgcaccgatcgcccttcccaacagttgcgcagcctgaatggcgaatggcgcctgatgcggtattttctccttacgcatctgtgcggtatttcacaccgcataaaacccatagagcccaccgcatccccagcatgcctgctattgtcttcccaatcctcccccttgctgtcctgccccaccccaccccccagaatagaatgacacctactcagacaatgcgatgcaatttcctcattttattaggaaaggacagtgggagtggcaccttccagggtcaaggaaggcacgggggaggggcaaacaacagatggctggcaactagaaggcacagctacctgcagtcggatcctatcaggggaatccaaaaccatacggggtttgggggcccccccggaaggcggagaaggcgccggggcttgcttctccggtcgggaggtcgcgaaagtaacacgcgtaacggcttccgctccgggcgtctggagcggcgggacgggccgccgtcccgtccgccgcatcggagtcgtcctccgtgtccagggggactggatctgcgggcgggggtgcggtgggcgaccccgtcttaggtttctttagggccgtgtccgcgcgcgcatcctcgccccccgagcgcccccgcttggtcgtgggagtgacccgcgtggtcgacgacggcatcggacaggcatgcaaggcccccgcctctcccgcccgggcagcgccatcgaggtcttccggatcgccgtggctgaccgcgtccgacgcggagtcctggctgtctgttggctcgctcccagaggcccgggaggccgagctcccggctgaaggagacccctggctatgacccagccagtccaggcaaatcttctggggtttcaggagaaataccgccgataccgcgttgggaccggtggcggtgacgcacagactggggacgggggtcgtgaggaagaacttgagggtgcccccgccgacctgcagtcgccggagcaccgcccgcatgctgcaatcgtcgacgaccacagagaaggtgcgatgggtattttccccgtacaccgtcttggcgttcgcggcggcctggcccgccttggtgagcgcgttggacaggatctggacctgggtgctggtgctggacgacacgccctcctcgcgggcagcaaaggtgacgcaggtactcgtggtgaacacggaaaatttgccgttaaccccgagctcgaacgtggtgggcgtggcactatcggccccggtcgcgttaaggaccttggtgagctgcggcctcgtcaggcgcaactgaacgtcgggggttccctggggaaccagcaccacaaagctcgtcagttcgcgcttcatcagcgtctcgctggctagctcaacggcctcgccgtcggacgtcgtcgtccatatgcgctgaaccagcgtgcgaaacggggcctggcccgtgatcgccaactccacccgacgtaggtccgggtactggttggcgcgaaacacgctcaggagggagcgcttctggtccacgagagacaggaacgccgccgtgggtccgcgccagcgataccgactgaattgcgagtgttccaggggcaggaacacctgctccccaaagatcgtgttatggataaggatgccccggtcgcccataaccagaagcgagtccagaaggctcgtgcgcagcggggcaaacgcctgtaggattccattaagttcggcgccctgcaggaccacctggcagggcgccccctcctccggctgcccgagggacgcgtccgacgcgtcctccacgggggaggcgggggccacaccgccaggggaatccgtcggtccaggattctcttcgacatctccggcttgtttcagcagagagaagtttgttgctccactgccgaattctgctagagtatcaaaggctctatgcaacattcgacgagtttcctccgccgtagcgccggcacccaccgccccgaaccctgcggtccggagccgcgcggccacgtcgtccggggggtgccacacttcgggaataaacctttttaacagactctcggtgatcttggcgttattcccaaacagggccttgaatgtcacgcacgccgcccccaacaggtgggagaagtaatagtccgtgttcagggcgacgccgtgggcaatggcgtatgcgggatcctcggccagctcggacaccagcagcttgcggggcttggacgcgcctcccggggggtcggcaggcgacggcgtctcccgggggcgcttggccggggagggcagggccgcggggggggcgggctcgtcccctggggcggcggcgtctagctcgcggagggcggccagccgcgcgaccgtctcctctacctcgcgggtctgggccacgatcacgtacgggatccggtccttgatggacgggacctgcgcgcggcgggccatgagcttgtaatacaccgtcaggtgggccaggcgcttgttggtgtacgcgcgcgggtgtctgctcagttcggcggtgaggacaaagtcctggatgtccctctccgggtcggtgatgcgccgatgggcgtctacgaggacggccccgaacgcctgcagtccctcgggcaggggtcgcgccagccactcctccgcggggcgctcggctaacgccgcggcggctccggagacggtatcgtcgtaaaacagcaggtcgaccagggccctggaggtgcggttgataaacgcgcagttgtttttgcgcaccagatccacgcccttgatgagcatcttacccccgtagatgacgccgatgtactttttcttggcgatcagcagcagcttggtgaacgtcttttcgcactcgagtttgatggggggcagaaacagcgcgcgcgagatgtggctcgccatcttgtcgcccacggccgtcagcccggcggccgtgaggccgcggcacagcacaaagatggagtccgtgtccccgtagatgatgcgcatggaatagggcccgggggcgcgcatgtcggccgcctccgggaaatcggccaggagctgttcgaaggccgcccagcgcgcgtggacgtactcgcgggtcgcgagcagcatctcgcggccgatggtcgtcaccgtcgcggcaacgtgcaggcacggcaggagtccgtgctgcactcccgtgaacccgtacaccgagttacacacgaccttgatggcggcctgctgcttgtccaggagcacggcctcctcggggctgctctggggaatccgcgagcggatctgctttcgcatggcgagccagtcccgcaggaggatgctgaggaggctctctcgcacgtgagccttgacgaagaacagccgtcgcccccccacctcgatctccaggtagtccttgcccgcctccaggtgcgccactgcgtcggccctcagggagagcgtgctgaagcacaggttgtgggcctggatgatgctggggtacaggctggcaaagtcgaacaccaccacggggttcacgtgaaacccggaagtggggtcaaggaccctggccccctggtaccccacgtgcctgccggcggtctcccgcgcgccctccggctcccgctcgcccccgccctcctcgcgttcgtcctcgtcctccccctcctcctctggccgctcctcgtcctcccgggctgcggccggacgcttgggcgcctcccccccggcgcccctaaatcgcccctgggtgtccggcagaataaagcccttctggtcggccaggcgcagcaggcacgtaaagacgcggatctgctggccgtcgtagatggtgcgggtgatgttaatacccgccaagcgcgcgacggccgagagctccagatggggcaaaaacttaaaaaacagctggcccaccagcagggaatcctgtatgcagtactcgccgatcaccccgcgttgcgcgggcccggcggcgtagtaggcggggatgtcgcgatagctcaggtccttcttcttgtccttcaggacggcttcggccacggcgttgagcttgtagctcgagagcttgatcttgtcggttataatcccgtacatgtcgatgttcaccatgccgttcacctttatcttgctgcgcttctggaagtggctctggcctatgtcccacacgcgaaacacgccccggccgttcatgcggccgtacccgtccagggggaccttgtaaatgtccgtcagcttggccagcaagaagggccagtcgaagttgatgatgttgtacccggtcacgaactcggggccgtactgtttcacaagggtcatgaaggccaacagcatctcgaattcgctgtcgaattccagaaccacgggcgtgggcaggcccctggccgccagctcgttcaggtgggattcggggaggtcgcaggaaccgagcgaaaacaggaggacgtgctccagggcggtggtggacaggtcgtagagcagacaggatatctggatgaccaggtcctccgggtgcccggccaccggaaaggccagctcgtcctccccccccgccttgcattcgatatcgaagcacatgagcttgtatgccggtaggtcgctcatgcccccctcgatggccaggttgtccgccgtacagttaaactcgacgtcgctggatgtcccgaaggccatcggggcccgcggctgggctagcgtgttgttccggcccggtttgagacggtaccagccgaaggtgacgaacccggggttgtccaggatgaaccgggtggtggcgtcgaccccaccctcgtacttcttgatggccgggcagaagttgtcgcacaggtacgacagcacgcgcccgcttcggacgtagacgcggtaaaacagagcggggcgcgtctcgtagtagtacacgtcggtgcgctccaccacctccgcctcgaagtggtccgcggagatgccgcggaacgacgcgcccggggactcgcgcagggccgcggccatgcgctcgcagagatctcgtggggcgcggcattgtaggtgcctgtcgacctcctccttgttcatgtaaaagtactgccgcgtgccgtaaacgtgaacggccacccggtggccttccggagtcaggcccaggagcgtgatgacggtccccgtcggtgtgatggcgtccataaaccgcgcgtggaactgggccgcgcgcatgccgtacgcgtgctccacgttctccaggatgtcgtacacgtgaaagacggtgacggtggggttgaaccccgccggggcgtggtccacgccgccccacaggcgcgagcgccgcggccagaagccgcccgacccgacgcggaggacgtcgcgctcgtcccccccgcagtacaccttgggggcgcgcttgaggtgaccgtcgtgcaccccggcgcgcttctccgggggggcatcctcgtccagcacccgcggggcgatgaatcgaaattcatcgcattcgctatagtacgtatggcgctgggttggcccggtcggcttctgttgcgtcccgactggggcgaggtaggggttgtaaaagttttgcctcaaacaaggcgggggtccccggctggctccgcgagggccggcgggcgcaaaaaacccggacgccgccctggccgccgactttcctccgggggacagcgggccgccgccaccggaaaacatggtggctttaccaacagtaccggtggatcgggcccgcggtgcgccggcgtttgcaaaagcctaggcctccaaaaaagcctcctcactacttctggaatagctcagaggccgaggcggcctcggcctctgcataaataaaaaaaattagtcagccatggggcggagaatgggcggaactgggcggagttaggggcgggatgggcggagttaggggcgggactatggttgctgactaattgagatgcatgctttgcatacttctgcctgctggggagcctggggactttccacacctggttgctgactaattgagatgcatgctttgcatacttctgcctgctggggagcctggggactttccacaccctaactgacacacatttaaatgaagatatggtgcactctcagtacaatctgctctgatgccgcatagttaagccagccccgacacccgccaacacccgctgacgcgccctgacgggcttgtctgctcccggcatccgcttacagacaagctgtgaccgtctccgggagctgcatgtgtcagaggttttcaccgtcatcaccgaaacgcgcga

SEQ ID NO: 103 - DNA, 17100 bp, Artificial Sequence
  Description of Artificial Sequence: Synthetic polynucleotide
tgcagctctggcccgtgtctcaaaatctctgatgttacattgcacaagataaaaatatatcatcatgaacaataaaactgtctgcttacataaacagtaatacaaggggtgttatgagccatattcaacgggaaacgtcgaggccgcgattaaattccaacatggatgctgatttatatgggtataaatgggctcgcgataatgtcgggcaatcaggtgcgacaatctatcgcttgtatgggaagcccgatgcgccagagttgtttctgaaacatggcaaaggtagcgttgccaatgatgttacagatgagatggtcagactaaactggctgacggaatttatgcctcttccgaccatcaagcattttatccgtactcctgatgatgcatggttactcaccactgcgatccccggaaaaacagcattccaggtattagaagaatatcctgattcaggtgaaaatattgttgatgcgctggcagtgttcctgcgccggttgcattcgattcctgtttgtaattgtccttttaacagcgatcgcgtatttcgtctcgctcaggcgcaatcacgaatgaataacggtttggttgatgcgagtgattttgatgacgagcgtaatggctggcctgttgaacaagtctggaaagaaatgcataaacttttgccattctcaccggattcagtcgtcactcatggtgatttctcacttgataaccttatttttgacgaggggaaattaataggttgtattgatgttggacgagtcggaatcgcagaccgataccaggatcttgccatcctatggaactgcctcggtgagttttctccttcattacagaaacggctttttcaaaaatatggtattgataatcctgatatgaataaattgcagtttcatttgatgctcgatgagtttttctaatcagaattggttaattggttgtaacattattcagattgggcttgatttaaaacttcatttttaatttaaaaggatctaggtgaagatcctttttgataatctcatgaccaaaatcccttaacgtgagttttcgttccactgagcgtcagaccccgtagaaaagatcaaaggatcttcttgagatcctttttttctgcgcgtaatctgctgcttgcaaacaaaaaaaccaccgctaccagcggtggtttgtttgccggatcaagagctaccaactctttttccgaaggtaactggcttcagcagagcgcagataccaaatactgttcttctagtgtagccgtagttaggccaccacttcaagaactctgtagcaccgcctacatacctcgctctgctaatcctgttaccagtggctgctgccagtggcgataagtcgtgtcttaccgggttggactcaagacgatagttaccggataaggcgcagcggtcgggctgaacggggggttcgtgcacacagcccagcttggagcgaacgacctacaccgaactgagatacctacagcgtgagctatgagaaagcgccacgcttcccgaagggagaaaggcggacaggtatccggtaagcggcagggtcggaacaggagagcgcacgagggagcttccagggggaaacgcctggtatctttatagtcctgtcgggtttcgccacctctgacttgagcgtcgatttttgtgatgctcgtcaggggggcggagcctatggaaaaacgccagcaacgcggcctttttacggttcctggccttttgctggccttttgctcacatgttctttcctgcgttatcccctgattctgtggataaccgtattaccgcctttgagtgagctgataccgctcgccgcagccgaacgaccgagcgcagcgagtcagtgagcgaggaagcggaagagcgcccaatacgcaaaccgcctctccccgcgcgttggccgattcattaatgcagctggcacgacaggtttcccgactggaaagcgggcagtgagcgcaacgcaattaatgtgagttagctcactcattaggcaccccaggctttacactttatgcttccggctcgtatgttgtgtggaattgtgagcggataacaatttcacacaggaaacagctatgaccatgattacaccaagcttgcatgcaggcctatccgtagatgtacctggacatccaggtgatgccggcggcggtggtggaggcgcgcggaaagtcgcggacgcggttccagatgttgcgcagcggcaaaaagtgctccatggtcgggacgctctggccggtgaggcgtgcgcagtcgttgacgctctagaccgtgcaaaaggagagcctgtaagcgggcactcttccgtggtctggtggataaattcgcaagggtatcatggcggacgaccggggttcgaaccccggatccggccgtccgccgtgatccatgcggttaccgcccgcgtgtcgaacccaggtgtgcgacgtcagacaacgggggagcgctccttttggcttccttccaggcgcggcggctgctgcgctagcttttttggccactggccgcgcgcggcgtaagcggttaggctggaaagcgaaagcattaagtggctcgctccctgtagccggagggttattttccaagggttgagtcgcaggacccccggttcgagtctcgggccggccggactgcggcgaacgggggtttgcctccccgtcatgcaagaccccgcttgcaaattcctccggaaacagggacgagccccttttttgcttttcccagatgcatccggtgctgcggcagatgcgcccccctcctcagcagcggcaagagcaagagcagcggcagacatgcagggcaccctccccttctcctaccgcgtcaggaggggcaacatcgatccagacatgataagatacattgatgagtttggacaaaccacaactagaatgcagtgaaaaaaatgctttatttgtgaaatttgtgatgctattgctttatttgtaaccattataagctgcaataaacaagtttgtacactctcgggtgattatttacccccacccttgccgtctgcgccgtttaaaaatcaaaggggttctgccgcgcatcgctatgcgccactggcagggacacgttgcgatactggtgtttagtgctccacttaaactcaggcacaaccatccgcggcagctcggtgaagttttcactccacaggctgcgcaccatcaccaacgcgtttagcaggtcgggcgccgatatcttgaagtcgcagttggggcctccgccctgcgcgcgcgagttgcgatacacagggttgcagcactggaacactatcagcgccgggtggtgcacgctggccagcacgctcttgtcggagatcagatccgcgtccaggtcctccgcgttgctcagggcgaacggagtcaactttggtagctgccttcccaaaaagggcgcgtgcccaggctttgagttgcactcgcaccgtagtggcatcaaaaggtgaccgtgcccggtctgggcgttaggatacagcgcctgcataaaagccttgatctgcttaaaagccacctgagcctttgcgccttcagagaagaacatgccgcaagacttgccggaaaactgattggccggacaggccgcgtcgtgcacgcagcaccttgcgtcggtgttggagatctgcaccacatttcggccccaccggttcttcacgatcttggccttgctagactgctccttcagcgcgcgctgcccgttttcgctcgtcacatccatttcaatcacgtgctccttatttatcataatgcttccgtgtagacacttaagctcgccttcgatctcagcgcagcggtgcagccacaacgcgcagcccgtgggctcgtgatgcttgtaggtcacctctgcaaacgactgcaggtacgcctgcaggaatcgccccatcatcgtcacaaaggtcttgttgctggtgaaggtcagctgcaacccgcggtgctcctcgttcagccaggtcttgcatacggccgccagagcttccacttggtcaggcagtagtttgaagttcgcctttagatcgttatccacgtggtacttgtccatcagcgcgcgcgcagcctccatgcccttctcccacgcagacacgatcggcacactcagcgggttcatcaccgtaatttcactttccgcttcgctgggctcttcctcttcctcttgcgtccgcataccacgcgccactgggtcgtcttcattcagccgccgcactgtgcgcttacctcctttgccatgcttgattagcaccggtgggttgctgaaacccaccatttgtagcgccacatcttctctttcttcctcgctgtccacgattacctctggtgatggcgggcgctcgggcttgggagaagggcgcttctttttcttcttgggcgcaatggccaaatccgccgccgaggtcgatggccgcgggctgggtgtgcgcggcaccagcgcgtcttgtgatgagtcttcctcgtcctcggactcgatacgccgcctcatccgcttttttgggggcgcccggggaggcggcggcgacggggacggggacgacacgtcctccatggttgggggacgtcgcgccgcaccgcgtccgcgctcgggggtggtttcgcgctgctcctcttcccgactggccatttccttctcctataggcagaaaaagatcatggagtcagtcgagaagaaggacagcctaaccgccccctctgagttcgccaccaccgcctccaccgatgccgccaacgcgcctaccaccttccccgtcgaggcacccccgcttgaggaggaggaagtgattatcgagcaggacccaggttttgtaagcgaagacgacgaggaccgctcagtaccaacagaggataaaaagcaagaccaggacaacgcagaggcaaacgaggaacaagtcgggcggggggacgaaaggcatggcgactacctagatgtgggagacgacgtgctgttgaagcatctgcagcgccagtgcgccattatctgcgacgcgttgcaagagcgcagcgatgtgcccctcgccatagcggatgtcagccttgcctacgaacgccacctattctcaccgcgcgtaccccccaaacgccaagaaaacggcacatgcgagcccaacccgcgcctcaacttctaccccgtatttgccgtgccagaggtgcttgccacctatcacatctttttccaaaactgcaagatacccctatcctgccgtgccaaccgcagccgagcggacaagcagctggccttgcggcagggcgctgtcatacctgatatcgcctcgctcaacgaagtgccaaaaatctttgagggtcttggacgcgacgagaagcgcgcggcaaacgctctgcaacaggaaaacagcgaaaatgaaagtcactctggagtgttggtggaactcgagggtgacaacgcgcgcctagccgtactaaaacgcagcatcgaggtcacccactttgcctacccggcacttaacctaccccccaaggtcatgagcacagtcatgagtgagctgatcgtgcgccgtgcgcagcccctggagagggatgcaaatttgcaagaacaaacagaggagggcctacccgcagttggcgacgagcagctagcgcgctggcttcaaacgcgcgagcctgccgacttggaggagcgacgcaaactaatgatggccgcagtgctcgttaccgtggagcttgagtgcatgcagcggttctttgctgacccggagatgcagcgcaagctagaggaaacattgcactacacctttcgacagggctacgtacgccaggcctgcaagatctccaacgtggagctctgcaacctggtctcctaccttggaattttgcacgaaaaccgccttgggcaaaacgtgcttcattccacgctcaagggcgaggcgcgccgcgactacgtccgcgactgcgtttacttatttctatgctacacctggcagacggccatgggcgtttggcagcagtgcttggaggagtgcaacctcaaggagctgcagaaactgctaaagcaaaacttgaaggacctatggacggccttcaacgagcgctccgtggccgcgcacctggcggacatcattttccccgaacgcctgcttaaaaccctgcaacagggtctgccagacttcaccagtcaaagcatgttgcagaactttaggaactttatcctagagcgctcaggaatcttgcccgccacctgctgtgcacttcctagcgactttgtgcccattaagtaccgcgaatgccctccgccgctttggggccactgctaccttctgcagctagccaactaccttgcctaccactctgacataatggaagacgtgagcggtgacggtctactggagtgtcactgtcgctgcaacctatgcaccccgcaccgctccctggtttgcaattcgcagctgcttaacgaaagtcaaattatcggtacctttgagctgcagggtccctcgcctgacgaaaagtccgcggctccggggttgaaactcactccggggctgtggacgtcggcttaccttcgcaaatttgtacctgaggactaccacgcccacgagattaggttctacgaagaccaatcccgcccgcctaatgcggagcttaccgcctgcgtcattacccagggccacattcttggccaattgcaagccatcaacaaagcccgccaagagtttctgctacgaaagggacggggggtttacttggacccccagtccggcgaggagctcaacccaatccccccgccgccgcagccctatcagcagcagccgcgggcccttgcttcccaggatggcacccaaaaagaagctgcagctgccgccgccacccacggacgaggaggaatactgggacagtcaggcagaggaggttttggacgaggaggaggaggacatgatggaagactgggagagcctagacgaggaagcttccgaggtcgaagaggtgtcagacgaaacaccgtcaccctcggtcgcattcccctcgccggcgccccagaaatcggcaaccggttccagcatggctacaacctccgctcctcaggcgccgccggcactgcccgttcgccgacccaaccgtagatgggacaccactggaaccagggccggtaagtccaagcagccgccgccgttagcccaagagcaacaacagcgccaaggctaccgctcatggcgcgggcacaagaacgccatagttgcttgcttgcaagactgtgggggcaacatctccttcgcccgccgctttcttctctaccatcacggcgtggccttcccccgtaacatcctgcattactaccgtcatctctacagcccatactgcaccggcggcagcggcagcaacagcagcggccacacagaagcaaaggcgaccggatagcaagactctgacaaagcccaagaaatccacagcggcggcagcagcaggaggaggagcgctgcgtctggcgcccaacgaacccgtatcgacccgcgagcttagaaacaggatttttcccactctgtatgctatatttcaacagagcaggggccaagaacaagagctgaaaataaaaaacaggtctctgcgatccctcacccgcagctgcctgtatcacaaaagcgaagatcagcttcggcgcacgctggaagacgcggaggctctcttcagtaaatactgcgcgctgactcttaaggactagtttcgcgccctttctcaaatttaagcgcgaaaactacgtcatctccagcggccacacccggcgccagcacctgttgtcagcgccattatgagcaaggaaattcccacgccctacatgtggagttaccagccacaaatgggacttgcggctggagctgcccaagactactcaacccgaataaactacatgagcgcggggcggccgcaacttgtttattgcagcttataatggttacaaataaagcaatagcatcacaaatttcacaaataaagcatttttttcactgcattctagttgtggtttgtccaaactcatcaatgtatcttagcttaacgggcggcgaaggagaagtccacgcctacatgggggtagagtcataatcgtgcatcaggatagggcggtggtgctgcagcagcgcgcgaataaactgctgccgccgccgctccgtcctgcaggaatacaacatggcagtggtctcctcagcgatgattcgcaccgcccgcagcataaggcgccttgtcctccgggcacagcagcgcaccctgatctcacttaaatcagcacagtaactgcagcacagcaccacaatattgttcaaaatcccacagtgcaaggcgctgtatccaaagctcatggcggggaccacagaacccacgtggccatcataccacaagcgcaggtagattaagtggcgacccctcataaacacgctggacataaacattacctcttttggcatgttgtaattcaccacctcccggtaccatataaacctctgattaaacatggcgccatccaccaccatcctaaaccagctggccaaaacctgcccgccggctatacactgcagggaaccgggactggaacaatgacagtggagagcccaggactcgtaaccatggatcatcatgctcgtcatgatatcaatgttggcacaacacaggcacacgtgcatacacttcctcaggattacaagctcctcccgcgttagaaccatatcccagggaacaacccattcctgaatcagcgtaaatcccacactgcagggaagacctcgcacgtaactcacgttgtgcattgtcaaagtgttacattcgggcagcagcggatgatcctccagtatggtagcgcgggtttctgtctcaaaaggaggtagacgatccctactgtacggagtgcgccgagacaaccgagatcgtgttggtcgtagtgtcatgccaaatggaacgccggacgtagtcatatttcctgaagcaaaaccaggtgcgggcgtgacaaacagatctgcgtctccggtctcgccgcttagatcgctctgtgtagtagttgtagtatatccactctctcaaagcatccaggcgccccctggcttcgggttctatgtaaactccttcatgcgccgctgccctgataacatccaccaccgcagaataagccacacccagccaacctacacattcgttctgcgagtcacacacgggaggagcgggaagagctggaagaaccatgtttttttttttattccaaaagattatccaaaacctcaaaatgaagatctattaagtgaacgcgctcccctccggtggcgtggtcaaactctacagccaaagaacagataatggcatttgtaagatgttgcacaatggcttccaaaaggcaaacggccctcacgtccaagtggacgtaaaggctaaacccttcagggtgaatctcctctataaacattccagcaccttcaaccatgcccaaataattctcatctcgccaccttctcaatatatctctaagcaaatcccgaatattaagtccggccattgtaaaaatctgctccagagcgccctccaccttcagcctcaagcagcgaatcatgattgcaaaaattcaggttcctcacagacctgtataagattcaaaagcggaacattaacaaaaataccgcgatcccgtaggtcccttcgcagggccagctgaacataatcgtgcaggtctgcacggaccagcgcggccacttccccgccaggaaccatgacaaaagaacccacactgattatgacacgcatactcggagctatgctaaccagcgtagccccgatgtaagcttgttgcatgggcggcgatataaaatgcaaggtgctgctcaaaaaatcaggcaaagcctcgcgcaaaaaagaaagcacatcgtagtcatgctcatgcagataaaggcaggtaagctccggaaccaccacagaaaaagacaccatttttctctcaaacatgtctgcgggtttctgcataaacacaaaataaaataacaaaaaaacatttaaacattagaagcctgtcttacaacaggaaaaacaacccttataagcataagacggactacggccatgccggcgtgaccgtaaaaaaactggtcaccgtgattaaaaagcaccaccgacagctcctcggtcatgtccggagtcataatgtaagactcggtaaacacatcaggttgattcacatcggtcagtgctaaaaagcgaccgaaatagcccgggggaatacatacccgcaggcgtagagacaacattacagcccccataggaggtataacaaaattaataggagagaaaaacacataaacacctgaaaaaccctcctgcctaggcaaaatagcaccctcccgctccagaacaacatacagcgcttccacagcggcagccatggtggcatttgcaaaagcctaggcctccaaaaaagcctcctcactacttctggaatagctcagaggccgaggcggcctcggcctctgcataaataaaaaaaattagtcagccatggggcggagaatgggcggaactgggcggagttaggggcgggatgggcggagttaggggcgggactatggttgctgactaattgagatgcatgctttgcatacttctgcctgctggggagcctggggactttccacacctggttgctgactaattgagatgcatgctttgcatacttctgcctgctggggagcctggggactttccacaccctaactgacacacacgttacgtcacttcccattttaagaaaactacaattcccaacacatacaagttactccgcccttaattaaatcggatccgatatctagatgtattcgcgaggtaccgagctcgaattctctggccgtcgttttacaacgtcgtgactgggaaaaccctggcgttacccaacttaatcgccttgcagcacatccccctttcgccagctggcgtaatagcgaagaggcccgcaccgatcgcccttcccaacagttgcgcagcctgaatggcgaatggcgcctgatgcggtattttctccttacgcatctgtgcggtatttcacaccgcatatcttcatttaaatgtgtgtcagttagggtgtggaaagtccccaggctccccagcaggcagaagtatgcaaagcatgcatctcaattagtcagcaaccaggtgtggaaagtccccaggctccccagcaggcagaagtatgcaaagcatgcatctcaattagtcagcaaccatagtcccgcccctaactccgcccatcccgcccctaactccgcccagttccgcccattctccgccccatggctgactaattttttttatttatgcagaggccgaggccgcctcggcctctgagctattccagaagtagtgaggaggcttttttggaggcctaggcttttgcaaacgccggcgcaccgcgggcccgatccaccggtactgttggtaaagccaccatgttttccggtggcggcggcccgctgtcccccggaggaaagtcggcggccagggcggcgtccgggttttttgcgcccgccggccctcgcggagccagccggggacccccgccttgtttgaggcaaaacttttacaacccctacctcgccccagtcgggacgcaacagaagccgaccgggccaacccagcgccatacgtactatagcgaatgcgatgaatttcgattcatcgccccgcgggtgctggacgaggatgcccccccggagaagcgcgccggggtgcacgacggtcacctcaagcgcgcccccaaggtgtactgcgggggggacgagcgcgacgtcctccgcgtcgggtcgggcggcttctggccgcggcgctcgcgcctgtggggcggcgtggaccacgccccggcggggttcaaccccaccgtcaccgtctttcacgtgtacgacatcctggagaacgtggagcacgcgtacggcatgcgcgcggcccagttccacgcgcggtttatggacgccatcacaccgacggggaccgtcatcacgctcctgggcctgactccggaaggccaccgggtggccgttcacgtttacggcacgcggcagtacttttacatgaacaaggaggaggtcgacaggcacctacaatgccgcgccccacgagatctctgcgagcgcatggccgcggccctgcgcgagtccccgggcgcgtcgttccgcggcatctccgcggaccacttcgaggcggaggtggtggagcgcaccgacgtgtactactacgagacgcgccccgctctgttttaccgcgtctacgtccgaagcgggcgcgtgctgtcgtacctgtgcgacaacttctgcccggccatcaagaagtacgagggtggggtcgacgccaccacccggttcatcctggacaaccccgggttcgtcaccttcggctggtaccgtctcaaaccgggccggaacaacacgctagcccagccgcgggccccgatggccttcgggacatccagcgacgtcgagtttaactgtacggcggacaacctggccatcgaggggggcatgagcgacctaccggcatacaagctcatgtgcttcgatatcgaatgcaaggcggggggggaggacgagctggcctttccggtggccgggcacccggaggacctggtcatccagatatcctgtctgctctacgacctgtccaccaccgccctggagcacgtcctcctgttttcgctcggttcctgcgacctccccgaatcccacctgaacgagctggcggccaggggcctgcccacgcccgtggttctggaattcgacagcgaattcgagatgctgttggccttcatgacccttgtgaaacagtacggccccgagttcgtgaccgggtacaacatcatcaacttcgactggcccttcttgctggccaagctgacggacatttacaaggtccccctggacgggtacggccgcatgaacggccggggcgtgtttcgcgtgtgggacataggccagagccacttccagaagcgcagcaagataaaggtgaacggcatggtgaacatcgacatgtacgggattataaccgacaagatcaagctctcgagctacaagctcaacgccgtggccgaagccgtcctgaaggacaagaagaaggacctgagctatcgcgacatccccgcctactacgccgccgggcccgcgcaacgcggggtgatcggcgagtactgcatacaggattccctgctggtgggccagctgttttttaagtttttgccccatctggagctctcggccgtcgcgcgcttggcgggtattaacatcacccgcaccatctacgacggccagcagatccgcgtctttacgtgcctgctgcgcctggccgaccagaagggctttattctgccggacacccaggggcgatttaggggcgccgggggggaggcgcccaagcgtccggccgcagcccgggaggacgaggagcggccagaggaggagggggaggacgaggacgaacgcgaggagggcgggggcgagcgggagccggagggcgcgcgggagaccgccggcaggcacgtggggtaccagggggccagggtccttgaccccacttccgggtttcacgtgaaccccgtggtggtgttcgactttgccagcctgtaccccagcatcatccaggcccacaacctgtgcttcagcacgctctccctgagggccgacgcagtggcgcacctggaggcgggcaaggactacctggagatcgaggtgggggggcgacggctgttcttcgtcaaggctcacgtgcgagagagcctcctcagcatcctcctgcgggactggctcgccatgcgaaagcagatccgctcgcggattccccagagcagccccgaggaggccgtgctcctggacaagcagcaggccgccatcaaggtcgtgtgtaactcggtgtacgggttcacgggagtgcagcacggactcctgccgtgcctgcacgttgccgcgacggtgacgaccatcggccgcgagatgctgctcgcgacccgcgagtacgtccacgcgcgctgggcggccttcgaacagctcctggccgatttcccggaggcggccgacatgcgcgcccccgggccctattccatgcgcatcatctacggggacacggactccatctttgtgctgtgccgcggcctcacggccgccgggctgacggccgtgggcgacaagatggcgagccacatctcgcgcgcgctgtttctgccccccatcaaactcgagtgcgaaaagacgttcaccaagctgctgctgatcgccaagaaaaagtacatcggcgtcatctacgggggtaagatgctcatcaagggcgtggatctggtgcgcaaaaacaactgcgcgtttatcaaccgcacctccagggccctggtcgacctgctgttttacgacgataccgtctccggagccgccgcggcgttagccgagcgccccgcggaggagtggctggcgcgacccctgcccgagggactgcaggcgttcggggccgtcctcgtagacgcccatcggcgcatcaccgacccggagagggacatccaggactttgtcctcaccgccgaactgagcagacacccgcgcgcgtacaccaacaagcgcctggcccacctgacggtgtattacaagctcatggcccgccgcgcgcaggtcccgtccatcaaggaccggatcccgtacgtgatcgtggcccagacccgcgaggtagaggagacggtcgcgcggctggccgccctccgcgagctagacgccgccgccccaggggacgagcccgccccccccgcggccctgccctccccggccaagcgcccccgggagacgccgtcgcctgccgaccccccgggaggcgcgtccaagccccgcaagctgctggtgtccgagctggccgaggatcccgcatacgccattgcccacggcgtcgccctgaacacggactattacttctcccacctgttgggggcggcgtgcgtgacattcaaggccctgtttgggaataacgccaagatcaccgagagtctgttaaaaaggtttattcccgaagtgtggcaccccccggacgacgtggccgcgcggctccggaccgcagggttcggggcggtgggtgccggcgctacggcggaggaaactcgtcgaatgttgcatagagcctttgatactctagcagaattcggcagtggagcaacaaacttctctctgctgaaacaagccggagatgtcgaagagaatcctggaccgacggattcccctggcggtgtggcccccgcctcccccgtggaggacgcgtcggacgcgtccctcgggcagccggaggagggggcgccctgccaggtggtcctgcagggcgccgaacttaatggaatcctacaggcgtttgccccgctgcgcacgagccttctggactcgcttctggttatgggcgaccggggcatccttatccataacacgatctttggggagcaggtgttcctgcccctggaacactcgcaattcagtcggtatcgctggcgcggacccacggcggcgttcctgtctctcgtggaccagaagcgctccctcctgagcgtgtttcgcgccaaccagtacccggacctacgtcgggtggagttggcgatcacgggccaggccccgtttcgcacgctggttcagcgcatatggacgacgacgtccgacggcgaggccgttgagctagccagcgagacgctgatgaagcgcgaactgacgagctttgtggtgctggttccccagggaacccccgacgttcagttgcgcctgacgaggccgcagctcaccaaggtccttaacgcgaccggggccgatagtgccacgcccaccacgttcgagctcggggttaacggcaaattttccgtgttcaccacgagtacctgcgtcacctttgctgcccgcgaggagggcgtgtcgtccagcaccagcacccaggtccagatcctgtccaacgcgctcaccaaggcgggccaggccgccgcgaacgccaagacggtgtacggggaaaatacccatcgcaccttctctgtggtcgtcgacgattgcagcatgcgggcggtgctccggcgactgcaggtcggcgggggcaccctcaagttcttcctcacgacccccgtccccagtctgtgcgtcaccgccaccggtcccaacgcggtatcggcggtatttctcctgaaaccccagaagatttgcctggactggctgggtcatagccaggggtctccttcagccgggagctcggcctcccgggcctctgggagcgagccaacagacagccaggactccgcgtcggacgcggtcagccacggcgatccggaagacctcgatggcgctgcccgggcgggagaggcgggggccttgcatgcctgtccgatgccgtcgtcgaccacgcgggtcactcccacgaccaagcgggggcgctcggggggcgaggatgcgcgcgcggacacggccctaaagaaacctaagacggggtcgcccaccgcacccccgcccgcagatccagtccccctggacacggaggacgactccgatgcggcggacgggacggcggcccgtcccgccgctccagacgcccggagcggaagccgttacgcgtgttactttcgcgacctcccgaccggagaagcaagccccggcgccttctccgccttccgggggggcccccaaaccccgtatggttttggattcccctgataggatccgactgcaggtagctgtgccttctagttgccagccatctgttgtttgcccctcccccgtgccttccttgaccctggaaggtgccactcccactgtcctttcctaataaaatgaggaaattgcatcgcattgtctgagtaggtgtcattctattctggggggtggggtggggcaggacagcaagggggaggattgggaagacaatagcaggcatgctggggatgcggtgggctctatgggttttatggtgcactctcagtacaatctgctctgatgccgcatagttaagccagccccgacacccgccaacacccgctgacgcgccctgacgggcttgtctgctcccggcatccgcttacagacaagctgtgaccgtctccgggagctgcatgtgtcagaggttttcaccgtcatcaccgaaacgcgcga

SEQ ID NO: 104 - DNA, 17100 bp, Artificial Sequence
  Description of Artificial Sequence: Synthetic polynucleotide
tgcagctctggcccgtgtctcaaaatctctgatgttacattgcacaagataaaaatatatcatcatgaacaataaaactgtctgcttacataaacagtaatacaaggggtgttatgagccatattcaacgggaaacgtcgaggccgcgattaaattccaacatggatgctgatttatatgggtataaatgggctcgcgataatgtcgggcaatcaggtgcgacaatctatcgcttgtatgggaagcccgatgcgccagagttgtttctgaaacatggcaaaggtagcgttgccaatgatgttacagatgagatggtcagactaaactggctgacggaatttatgcctcttccgaccatcaagcattttatccgtactcctgatgatgcatggttactcaccactgcgatccccggaaaaacagcattccaggtattagaagaatatcctgattcaggtgaaaatattgttgatgcgctggcagtgttcctgcgccggttgcattcgattcctgtttgtaattgtccttttaacagcgatcgcgtatttcgtctcgctcaggcgcaatcacgaatgaataacggtttggttgatgcgagtgattttgatgacgagcgtaatggctggcctgttgaacaagtctggaaagaaatgcataaacttttgccattctcaccggattcagtcgtcactcatggtgatttctcacttgataaccttatttttgacgaggggaaattaataggttgtattgatgttggacgagtcggaatcgcagaccgataccaggatcttgccatcctatggaactgcctcggtgagttttctccttcattacagaaacggctttttcaaaaatatggtattgataatcctgatatgaataaattgcagtttcatttgatgctcgatgagtttttctaatcagaattggttaattggttgtaacattattcagattgggcttgatttaaaacttcatttttaatttaaaaggatctaggtgaagatcctttttgataatctcatgaccaaaatcccttaacgtgagttttcgttccactgagcgtcagaccccgtagaaaagatcaaaggatcttcttgagatcctttttttctgcgcgtaatctgctgcttgcaaacaaaaaaaccaccgctaccagcggtggtttgtttgccggatcaagagctaccaactctttttccgaaggtaactggcttcagcagagcgcagataccaaatactgttcttctagtgtagccgtagttaggccaccacttcaagaactctgtagcaccgcctacatacctcgctctgctaatcctgttaccagtggctgctgccagtggcgataagtcgtgtcttaccgggttggactcaagacgatagttaccggataaggcgcagcggtcgggctgaacggggggttcgtgcacacagcccagcttggagcgaacgacctacaccgaactgagatacctacagcgtgagctatgagaaagcgccacgcttcccgaagggagaaaggcggacaggtatccggtaagcggcagggtcggaacaggagagcgcacgagggagcttccagggggaaacgcctggtatctttatagtcctgtcgggtttcgccacctctgacttgagcgtcgatttttgtgatgctcgtcaggggggcggagcctatggaaaaacgccagcaacgcggcctttttacggttcctggccttttgctggccttttgctcacatgttctttcctgcgttatcccctgattctgtggataaccgtattaccgcctttgagtgagctgataccgctcgccgcagccgaacgaccgagcgcagcgagtcagtgagcgaggaagcggaagagcgcccaatacgcaaaccgcctctccccgcgcgttggccgattcattaatgcagctggcacgacaggtttcccgactggaaagcgggcagtgagcgcaacgcaattaatgtgagttagctcactcattaggcaccccaggctttacactttatgcttccggctcgtatgttgtgtggaattgtgagcggataacaatttcacacaggaaacagctatgaccatgattacaccaagcttgcatgcaggcctatccgtagatgtacctggacatccaggtgatgccggcggcggtggtggaggcgcgcggaaagtcgcggacgcggttccagatgttgcgcagcggcaaaaagtgctccatggtcgggacgctctggccggtgaggcgtgcgcagtcgttgacgctctagaccgtgcaaaaggagagcctgtaagcgggcactcttccgtggtctggtggataaattcgcaagggtatcatggcggacgaccggggttcgaaccccggatccggccgtccgccgtgatccatgcggttaccgcccgcgtgtcgaacccaggtgtgcgacgtcagacaacgggggagcgctccttttggcttccttccaggcgcggcggctgctgcgctagcttttttggccactggccgcgcgcggcgtaagcggttaggctggaaagcgaaagcattaagtggctcgctccctgtagccggagggttattttccaagggttgagtcgcaggacccccggttcgagtctcgggccggccggactgcggcgaacgggggtttgcctccccgtcatgcaagaccccgcttgcaaattcctccggaaacagggacgagccccttttttgcttttcccagatgcatccggtgctgcggcagatgcgcccccctcctcagcagcggcaagagcaagagcagcggcagacatgcagggcaccctccccttctcctaccgcgtcaggaggggcaacatcgatccagacatgataagatacattgatgagtttggacaaaccacaactagaatgcagtgaaaaaaatgctttatttgtgaaatttgtgatgctattgctttatttgtaaccattataagctgcaataaacaagtttgtacactctcgggtgattatttacccccacccttgccgtctgcgccgtttaaaaatcaaaggggttctgccgcgcatcgctatgcgccactggcagggacacgttgcgatactggtgtttagtgctccacttaaactcaggcacaaccatccgcggcagctcggtgaagttttcactccacaggctgcgcaccatcaccaacgcgtttagcaggtcgggcgccgatatcttgaagtcgcagttggggcctccgccctgcgcgcgcgagttgcgatacacagggttgcagcactggaacactatcagcgccgggtggtgcacgctggccagcacgctcttgtcggagatcagatccgcgtccaggtcctccgcgttgctcagggcgaacggagtcaactttggtagctgccttcccaaaaagggcgcgtgcccaggctttgagttgcactcgcaccgtagtggcatcaaaaggtgaccgtgcccggtctgggcgttaggatacagcgcctgcataaaagccttgatctgcttaaaagccacctgagcctttgcgccttcagagaagaacatgccgcaagacttgccggaaaactgattggccggacaggccgcgtcgtgcacgcagcaccttgcgtcggtgttggagatctgcaccacatttcggccccaccggttcttcacgatcttggccttgctagactgctccttcagcgcgcgctgcccgttttcgctcgtcacatccatttcaatcacgtgctccttatttatcataatgcttccgtgtagacacttaagctcgccttcgatctcagcgcagcggtgcagccacaacgcgcagcccgtgggctcgtgatgcttgtaggtcacctctgcaaacgactgcaggtacgcctgcaggaatcgccccatcatcgtcacaaaggtcttgttgctggtgaaggtcagctgcaacccgcggtgctcctcgttcagccaggtcttgcatacggccgccagagcttccacttggtcaggcagtagtttgaagttcgcctttagatcgttatccacgtggtacttgtccatcagcgcgcgcgcagcctccatgcccttctcccacgcagacacgatcggcacactcagcgggttcatcaccgtaatttcactttccgcttcgctgggctcttcctcttcctcttgcgtccgcataccacgcgccactgggtcgtcttcattcagccgccgcactgtgcgcttacctcctttgccatgcttgattagcaccggtgggttgctgaaacccaccatttgtagcgccacatcttctctttcttcctcgctgtccacgattacctctggtgatggcgggcgctcgggcttgggagaagggcgcttctttttcttcttgggcgcaatggccaaatccgccgccgaggtcgatggccgcgggctgggtgtgcgcggcaccagcgcgtcttgtgatgagtcttcctcgtcctcggactcgatacgccgcctcatccgcttttttgggggcgcccggggaggcggcggcgacggggacggggacgacacgtcctccatggttgggggacgtcgcgccgcaccgcgtccgcgctcgggggtggtttcgcgctgctcctcttcccgactggccatttccttctcctataggcagaaaaagatcatggagtcagtcgagaagaaggacagcctaaccgccccctctgagttcgccaccaccgcctccaccgatgccgccaacgcgcctaccaccttccccgtcgaggcacccccgcttgaggaggaggaagtgattatcgagcaggacccaggttttgtaagcgaagacgacgaggaccgctcagtaccaacagaggataaaaagcaagaccaggacaacgcagaggcaaacgaggaacaagtcgggcggggggacgaaaggcatggcgactacctagatgtgggagacgacgtgctgttgaagcatctgcagcgccagtgcgccattatctgcgacgcgttgcaagagcgcagcgatgtgcccctcgccatagcggatgtcagccttgcctacgaacgccacctattctcaccgcgcgtaccccccaaacgccaagaaaacggcacatgcgagcccaacccgcgcctcaacttctaccccgtatttgccgtgccagaggtgcttgccacctatcacatctttttccaaaactgcaagatacccctatcctgccgtgccaaccgcagccgagcggacaagcagctggccttgcggcagggcgctgtcatacctgatatcgcctcgctcaacgaagtgccaaaaatctttgagggtcttggacgcgacgagaagcgcgcggcaaacgctctgcaacaggaaaacagcgaaaatgaaagtcactctggagtgttggtggaactcgagggtgacaacgcgcgcctagccgtactaaaacgcagcatcgaggtcacccactttgcctacccggcacttaacctaccccccaaggtcatgagcacagtcatgagtgagctgatcgtgcgccgtgcgcagcccctggagagggatgcaaatttgcaagaacaaacagaggagggcctacccgcagttggcgacgagcagctagcgcgctggcttcaaacgcgcgagcctgccgacttggaggagcgacgcaaactaatgatggccgcagtgctcgttaccgtggagcttgagtgcatgcagcggttctttgctgacccggagatgcagcgcaagctagaggaaacattgcactacacctttcgacagggctacgtacgccaggcctgcaagatctccaacgtggagctctgcaacctggtctcctaccttggaattttgcacgaaaaccgccttgggcaaaacgtgcttcattccacgctcaagggcgaggcgcgccgcgactacgtccgcgactgcgtttacttatttctatgctacacctggcagacggccatgggcgtttggcagcagtgcttggaggagtgcaacctcaaggagctgcagaaactgctaaagcaaaacttgaaggacctatggacggccttcaacgagcgctccgtggccgcgcacctggcggacatcattttccccgaacgcctgcttaaaaccctgcaacagggtctgccagacttcaccagtcaaagcatgttgcagaactttaggaactttatcctagagcgctcaggaatcttgcccgccacctgctgtgcacttcctagcgactttgtgcccattaagtaccgcgaatgccctccgccgctttggggccactgctaccttctgcagctagccaactaccttgcctaccactctgacataatggaagacgtgagcggtgacggtctactggagtgtcactgtcgctgcaacctatgcaccccgcaccgctccctggtttgcaattcgcagctgcttaacgaaagtcaaattatcggtacctttgagctgcagggtccctcgcctgacgaaaagtccgcggctccggggttgaaactcactccggggctgtggacgtcggcttaccttcgcaaatttgtacctgaggactaccacgcccacgagattaggttctacgaagaccaatcccgcccgcctaatgcggagcttaccgcctgcgtcattacccagggccacattcttggccaattgcaagccatcaacaaagcccgccaagagtttctgctacgaaagggacggggggtttacttggacccccagtccggcgaggagctcaacccaatccccccgccgccgcagccctatcagcagcagccgcgggcccttgcttcccaggatggcacccaaaaagaagctgcagctgccgccgccacccacggacgaggaggaatactgggacagtcaggcagaggaggttttggacgaggaggaggaggacatgatggaagactgggagagcctagacgaggaagcttccgaggtcgaagaggtgtcagacgaaacaccgtcaccctcggtcgcattcccctcgccggcgccccagaaatcggcaaccggttccagcatggctacaacctccgctcctcaggcgccgccggcactgcccgttcgccgacccaaccgtagatgggacaccactggaaccagggccggtaagtccaagcagccgccgccgttagcccaagagcaacaacagcgccaaggctaccgctcatggcgcgggcacaagaacgccatagttgcttgcttgcaagactgtgggggcaacatctccttcgcccgccgctttcttctctaccatcacggcgtggccttcccccgtaacatcctgcattactaccgtcatctctacagcccatactgcaccggcggcagcggcagcaacagcagcggccacacagaagcaaaggcgaccggatagcaagactctgacaaagcccaagaaatccacagcggcggcagcagcaggaggaggagcgctgcgtctggcgcccaacgaacccgtatcgacccgcgagcttagaaacaggatttttcccactctgtatgctatatttcaacagagcaggggccaagaacaagagctgaaaataaaaaacaggtctctgcgatccctcacccgcagctgcctgtatcacaaaagcgaagatcagcttcggcgcacgctggaagacgcggaggctctcttcagtaaatactgcgcgctgactcttaaggactagtttcgcgccctttctcaaatttaagcgcgaaaactacgtcatctccagcggccacacccggcgccagcacctgttgtcagcgccattatgagcaaggaaattcccacgccctacatgtggagttaccagccacaaatgggacttgcggctggagctgcccaagactactcaacccgaataaactacatgagcgcggggcggccgcaacttgtttattgcagcttataatggttacaaataaagcaatagcatcacaaatttcacaaataaagcatttttttcactgcattctagttgtggtttgtccaaactcatcaatgtatcttagcttaacgggcggcgaaggagaagtccacgcctacatgggggtagagtcataatcgtgcatcaggatagggcggtggtgctgcagcagcgcgcgaataaactgctgccgccgccgctccgtcctgcaggaatacaacatggcagtggtctcctcagcgatgattcgcaccgcccgcagcataaggcgccttgtcctccgggcacagcagcgcaccctgatctcacttaaatcagcacagtaactgcagcacagcaccacaatattgttcaaaatcccacagtgcaaggcgctgtatccaaagctcatggcggggaccacagaacccacgtggccatcataccacaagcgcaggtagattaagtggcgacccctcataaacacgctggacataaacattacctcttttggcatgttgtaattcaccacctcccggtaccatataaacctctgattaaacatggcgccatccaccaccatcctaaaccagctggccaaaacctgcccgccggctatacactgcagggaaccgggactggaacaatgacagtggagagcccaggactcgtaaccatggatcatcatgctcgtcatgatatcaatgttggcacaacacaggcacacgtgcatacacttcctcaggattacaagctcctcccgcgttagaaccatatcccagggaacaacccattcctgaatcagcgtaaatcccacactgcagggaagacctcgcacgtaactcacgttgtgcattgtcaaagtgttacattcgggcagcagcggatgatcctccagtatggtagcgcgggtttctgtctcaaaaggaggtagacgatccctactgtacggagtgcgccgagacaaccgagatcgtgttggtcgtagtgtcatgccaaatggaacgccggacgtagtcatatttcctgaagcaaaaccaggtgcgggcgtgacaaacagatctgcgtctccggtctcgccgcttagatcgctctgtgtagtagttgtagtatatccactctctcaaagcatccaggcgccccctggcttcgggttctatgtaaactccttcatgcgccgctgccctgataacatccaccaccgcagaataagccacacccagccaacctacacattcgttctgcgagtcacacacgggaggagcgggaagagctggaagaaccatgtttttttttttattccaaaagattatccaaaacctcaaaatgaagatctattaagtgaacgcgctcccctccggtggcgtggtcaaactctacagccaaagaacagataatggcatttgtaagatgttgcacaatggcttccaaaaggcaaacggccctcacgtccaagtggacgtaaaggctaaacccttcagggtgaatctcctctataaacattccagcaccttcaaccatgcccaaataattctcatctcgccaccttctcaatatatctctaagcaaatcccgaatattaagtccggccattgtaaaaatctgctccagagcgccctccaccttcagcctcaagcagcgaatcatgattgcaaaaattcaggttcctcacagacctgtataagattcaaaagcggaacattaacaaaaataccgcgatcccgtaggtcccttcgcagggccagctgaacataatcgtgcaggtctgcacggaccagcgcggccacttccccgccaggaaccatgacaaaagaacccacactgattatgacacgcatactcggagctatgctaaccagcgtagccccgatgtaagcttgttgcatgggcggcgatataaaatgcaaggtgctgctcaaaaaatcaggcaaagcctcgcgcaaaaaagaaagcacatcgtagtcatgctcatgcagataaaggcaggtaagctccggaaccaccacagaaaaagacaccatttttctctcaaacatgtctgcgggtttctgcataaacacaaaataaaataacaaaaaaacatttaaacattagaagcctgtcttacaacaggaaaaacaacccttataagcataagacggactacggccatgccggcgtgaccgtaaaaaaactggtcaccgtgattaaaaagcaccaccgacagctcctcggtcatgtccggagtcataatgtaagactcggtaaacacatcaggttgattcacatcggtcagtgctaaaaagcgaccgaaatagcccgggggaatacatacccgcaggcgtagagacaacattacagcccccataggaggtataacaaaattaataggagagaaaaacacataaacacctgaaaaaccctcctgcctaggcaaaatagcaccctcccgctccagaacaacatacagcgcttccacagcggcagccatggtggcatttgcaaaagcctaggcctccaaaaaagcctcctcactacttctggaatagctcagaggccgaggcggcctcggcctctgcataaataaaaaaaattagtcagccatggggcggagaatgggcggaactgggcggagttaggggcgggatgggcggagttaggggcgggactatggttgctgactaattgagatgcatgctttgcatacttctgcctgctggggagcctggggactttccacacctggttgctgactaattgagatgcatgctttgcatacttctgcctgctggggagcctggggactttccacaccctaactgacacacacgttacgtcacttcccattttaagaaaactacaattcccaacacatacaagttactccgcccttaattaaatcggatccgatatctagatgtattcgcgaggtaccgagctcgaattctctggccgtcgttttacaacgtcgtgactgggaaaaccctggcgttacccaacttaatcgccttgcagcacatccccctttcgccagctggcgtaatagcgaagaggcccgcaccgatcgcccttcccaacagttgcgcagcctgaatggcgaatggcgcctgatgcggtattttctccttacgcatctgtgcggtatttcacaccgcataaaacccatagagcccaccgcatccccagcatgcctgctattgtcttcccaatcctcccccttgctgtcctgccccaccccaccccccagaatagaatgacacctactcagacaatgcgatgcaatttcctcattttattaggaaaggacagtgggagtggcaccttccagggtcaaggaaggcacgggggaggggcaaacaacagatggctggcaactagaaggcacagctacctgcagtcggatcctatcaggggaatccaaaaccatacggggtttgggggcccccccggaaggcggagaaggcgccggggcttgcttctccggtcgggaggtcgcgaaagtaacacgcgtaacggcttccgctccgggcgtctggagcggcgggacgggccgccgtcccgtccgccgcatcggagtcgtcctccgtgtccagggggactggatctgcgggcgggggtgcggtgggcgaccccgtcttaggtttctttagggccgtgtccgcgcgcgcatcctcgccccccgagcgcccccgcttggtcgtgggagtgacccgcgtggtcgacgacggcatcggacaggcatgcaaggcccccgcctctcccgcccgggcagcgccatcgaggtcttccggatcgccgtggctgaccgcgtccgacgcggagtcctggctgtctgttggctcgctcccagaggcccgggaggccgagctcccggctgaaggagacccctggctatgacccagccagtccaggcaaatcttctggggtttcaggagaaataccgccgataccgcgttgggaccggtggcggtgacgcacagactggggacgggggtcgtgaggaagaacttgagggtgcccccgccgacctgcagtcgccggagcaccgcccgcatgctgcaatcgtcgacgaccacagagaaggtgcgatgggtattttccccgtacaccgtcttggcgttcgcggcggcctggcccgccttggtgagcgcgttggacaggatctggacctgggtgctggtgctggacgacacgccctcctcgcgggcagcaaaggtgacgcaggtactcgtggtgaacacggaaaatttgccgttaaccccgagctcgaacgtggtgggcgtggcactatcggccccggtcgcgttaaggaccttggtgagctgcggcctcgtcaggcgcaactgaacgtcgggggttccctggggaaccagcaccacaaagctcgtcagttcgcgcttcatcagcgtctcgctggctagctcaacggcctcgccgtcggacgtcgtcgtccatatgcgctgaaccagcgtgcgaaacggggcctggcccgtgatcgccaactccacccgacgtaggtccgggtactggttggcgcgaaacacgctcaggagggagcgcttctggtccacgagagacaggaacgccgccgtgggtccgcgccagcgataccgactgaattgcgagtgttccaggggcaggaacacctgctccccaaagatcgtgttatggataaggatgccccggtcgcccataaccagaagcgagtccagaaggctcgtgcgcagcggggcaaacgcctgtaggattccattaagttcggcgccctgcaggaccacctggcagggcgccccctcctccggctgcccgagggacgcgtccgacgcgtcctccacgggggaggcgggggccacaccgccaggggaatccgtcggtccaggattctcttcgacatctccggcttgtttcagcagagagaagtttgttgctccactgccgaattctgctagagtatcaaaggctctatgcaacattcgacgagtttcctccgccgtagcgccggcacccaccgccccgaaccctgcggtccggagccgcgcggccacgtcgtccggggggtgccacacttcgggaataaacctttttaacagactctcggtgatcttggcgttattcccaaacagggccttgaatgtcacgcacgccgcccccaacaggtgggagaagtaatagtccgtgttcagggcgacgccgtgggcaatggcgtatgcgggatcctcggccagctcggacaccagcagcttgcggggcttggacgcgcctcccggggggtcggcaggcgacggcgtctcccgggggcgcttggccggggagggcagggccgcggggggggcgggctcgtcccctggggcggcggcgtctagctcgcggagggcggccagccgcgcgaccgtctcctctacctcgcgggtctgggccacgatcacgtacgggatccggtccttgatggacgggacctgcgcgcggcgggccatgagcttgtaatacaccgtcaggtgggccaggcgcttgttggtgtacgcgcgcgggtgtctgctcagttcggcggtgaggacaaagtcctggatgtccctctccgggtcggtgatgcgccgatgggcgtctacgaggacggccccgaacgcctgcagtccctcgggcaggggtcgcgccagccactcctccgcggggcgctcggctaacgccgcggcggctccggagacggtatcgtcgtaaaacagcaggtcgaccagggccctggaggtgcggttgataaacgcgcagttgtttttgcgcaccagatccacgcccttgatgagcatcttacccccgtagatgacgccgatgtactttttcttggcgatcagcagcagcttggtgaacgtcttttcgcactcgagtttgatggggggcagaaacagcgcgcgcgagatgtggctcgccatcttgtcgcccacggccgtcagcccggcggccgtgaggccgcggcacagcacaaagatggagtccgtgtccccgtagatgatgcgcatggaatagggcccgggggcgcgcatgtcggccgcctccgggaaatcggccaggagctgttcgaaggccgcccagcgcgcgtggacgtactcgcgggtcgcgagcagcatctcgcggccgatggtcgtcaccgtcgcggcaacgtgcaggcacggcaggagtccgtgctgcactcccgtgaacccgtacaccgagttacacacgaccttgatggcggcctgctgcttgtccaggagcacggcctcctcggggctgctctggggaatccgcgagcggatctgctttcgcatggcgagccagtcccgcaggaggatgctgaggaggctctctcgcacgtgagccttgacgaagaacagccgtcgcccccccacctcgatctccaggtagtccttgcccgcctccaggtgcgccactgcgtcggccctcagggagagcgtgctgaagcacaggttgtgggcctggatgatgctggggtacaggctggcaaagtcgaacaccaccacggggttcacgtgaaacccggaagtggggtcaaggaccctggccccctggtaccccacgtgcctgccggcggtctcccgcgcgccctccggctcccgctcgcccccgccctcctcgcgttcgtcctcgtcctccccctcctcctctggccgctcctcgtcctcccgggctgcggccggacgcttgggcgcctcccccccggcgcccctaaatcgcccctgggtgtccggcagaataaagcccttctggtcggccaggcgcagcaggcacgtaaagacgcggatctgctggccgtcgtagatggtgcgggtgatgttaatacccgccaagcgcgcgacggccgagagctccagatggggcaaaaacttaaaaaacagctggcccaccagcagggaatcctgtatgcagtactcgccgatcaccccgcgttgcgcgggcccggcggcgtagtaggcggggatgtcgcgatagctcaggtccttcttcttgtccttcaggacggcttcggccacggcgttgagcttgtagctcgagagcttgatcttgtcggttataatcccgtacatgtcgatgttcaccatgccgttcacctttatcttgctgcgcttctggaagtggctctggcctatgtcccacacgcgaaacacgccccggccgttcatgcggccgtacccgtccagggggaccttgtaaatgtccgtcagcttggccagcaagaagggccagtcgaagttgatgatgttgtacccggtcacgaactcggggccgtactgtttcacaagggtcatgaaggccaacagcatctcgaattcgctgtcgaattccagaaccacgggcgtgggcaggcccctggccgccagctcgttcaggtgggattcggggaggtcgcaggaaccgagcgaaaacaggaggacgtgctccagggcggtggtggacaggtcgtagagcagacaggatatctggatgaccaggtcctccgggtgcccggccaccggaaaggccagctcgtcctccccccccgccttgcattcgatatcgaagcacatgagcttgtatgccggtaggtcgctcatgcccccctcgatggccaggttgtccgccgtacagttaaactcgacgtcgctggatgtcccgaaggccatcggggcccgcggctgggctagcgtgttgttccggcccggtttgagacggtaccagccgaaggtgacgaacccggggttgtccaggatgaaccgggtggtggcgtcgaccccaccctcgtacttcttgatggccgggcagaagttgtcgcacaggtacgacagcacgcgcccgcttcggacgtagacgcggtaaaacagagcggggcgcgtctcgtagtagtacacgtcggtgcgctccaccacctccgcctcgaagtggtccgcggagatgccgcggaacgacgcgcccggggactcgcgcagggccgcggccatgcgctcgcagagatctcgtggggcgcggcattgtaggtgcctgtcgacctcctccttgttcatgtaaaagtactgccgcgtgccgtaaacgtgaacggccacccggtggccttccggagtcaggcccaggagcgtgatgacggtccccgtcggtgtgatggcgtccataaaccgcgcgtggaactgggccgcgcgcatgccgtacgcgtgctccacgttctccaggatgtcgtacacgtgaaagacggtgacggtggggttgaaccccgccggggcgtggtccacgccgccccacaggcgcgagcgccgcggccagaagccgcccgacccgacgcggaggacgtcgcgctcgtcccccccgcagtacaccttgggggcgcgcttgaggtgaccgtcgtgcaccccggcgcgcttctccgggggggcatcctcgtccagcacccgcggggcgatgaatcgaaattcatcgcattcgctatagtacgtatggcgctgggttggcccggtcggcttctgttgcgtcccgactggggcgaggtaggggttgtaaaagttttgcctcaaacaaggcgggggtccccggctggctccgcgagggccggcgggcgcaaaaaacccggacgccgccctggccgccgactttcctccgggggacagcgggccgccgccaccggaaaacatggtggctttaccaacagtaccggtggatcgggcccgcggtgcgccggcgtttgcaaaagcctaggcctccaaaaaagcctcctcactacttctggaatagctcagaggccgaggcggcctcggcctctgcataaataaaaaaaattagtcagccatggggcggagaatgggcggaactgggcggagttaggggcgggatgggcggagttaggggcgggactatggttgctgactaattgagatgcatgctttgcatacttctgcctgctggggagcctggggactttccacacctggttgctgactaattgagatgcatgctttgcatacttctgcctgctggggagcctggggactttccacaccctaactgacacacatttaaatgaagatatggtgcactctcagtacaatctgctctgatgccgcatagttaagccagccccgacacccgccaacacccgctgacgcgccctgacgggcttgtctgctcccggcatccgcttacagacaagctgtgaccgtctccgggagctgcatgtgtcagaggttttcaccgtcatcaccgaaacgcgcga

SEQ ID NO: 105 - DNA, 11635 bp, Artificial Sequence
  Description of Artificial Sequence: Synthetic polynucleotide
ggtacccaactccatgcttaacagtccccaggtacagcccaccctgcgtcgcaaccaggaacagctctacagcttcctggagcgccactcgccctacttccgcagccacagtgcgcagattaggagcgccacttctttttgtcacttgaaaaacatgtaaaaataatgtactaggagacactttcaataaaggcaaatgtttttatttgtacactctcgggtgattatttaccccccacccttgccgtctgcgccgtttaaaaatcaaaggggttctgccgcgcatcgctatgcgccactggcagggacacgttgcgatactggtgtttagtgctccacttaaactcaggcacaaccatccgcggcagctcggtgaagttttcactccacaggctgcgcaccatcaccaacgcgtttagcaggtcgggcgccgatatcttgaagtcgcagttggggcctccgccctgcgcgcgcgagttgcgatacacagggttgcagcactggaacactatcagcgccgggtggtgcacgctggccagcacgctcttgtcggagatcagatccgcgtccaggtcctccgcgttgctcagggcgaacggagtcaactttggtagctgccttcccaaaaagggtgcatgcccaggctttgagttgcactcgcaccgtagtggcatcagaaggtgaccgtgcccggtctgggcgttaggatacagcgcctgcatgaaagccttgatctgcttaaaagccacctgagcctttgcgccttcagagaagaacatgccgcaagacttgccggaaaactgattggccggacaggccgcgtcatgcacgcagcaccttgcgtcggtgttggagatctgcaccacatttcggccccaccggttcttcacgatcttggccttgctagactgctccttcagcgcgcgctgcccgttttcgctcgtcacatccatttcaatcacgtgctccttatttatcataatgctcccgtgtagacacttaagctcgccttcgatctcagcgcagcggtgcagccacaacgcgcagcccgtgggctcgtggtgcttgtaggttacctctgcaaacgactgcaggtacgcctgcaggaatcgccccatcatcgtcacaaaggtcttgttgctggtgaaggtcagctgcaacccgcggtgctcctcgtttagccaggtcttgcatacggccgccagagcttccacttggtcaggcagtagcttgaagtttgcctttagatcgttatccacgtggtacttgtccatcaacgcgcgcgcagcctccatgcccttctcccacgcagacacgatcggcaggctcagcgggtttatcaccgtgctttcactttccgcttcactggactcttccttttcctcttgcgtccgcataccccgcgccactgggtcgtcttcattcagccgccgcaccgtgcgcttacctcccttgccgtgcttgattagcaccggtgggttgctgaaacccaccatttgtagcgccacatcttctctttcttcctcgctgtccacgatcacctctggggatggcgggcgctcgggcttgggagaggggcgcttctttttctttttggacgcaatggccaaatccgccgtcgaggtcgatggccgcgggctgggtgtgcgcggcaccagcgcatcttgtgacgagtcttcttcgtcctcggactcgagacgccgcctcagccgcttttttgggggcgcgcggggaggcggcggcgacggcgacggggacgacacgtcctccatggttggtggacgtcgcgccgcaccgcgtccgcgctcgggggtggtttcgcgctgctcctcttcccgactggccatttccttctcctataggcagaaaaagatcatggagtcagtcgagaaggaggacagcctaaccgccccctttgagttcgccaccaccgcctccaccgatgccgccaacgcgcctaccaccttccccgtcgaggcacccccgcttgaggaggaggaagtgattatcgagcaggacccaggttttgtaagcgaagacgacgaggatcgctcagtaccaacagaggataaaaagcaagaccaggacgacgcagaggcaaacgaggaacaagtcgggcggggggaccaaaggcatggcgactacctagatgtgggagacgacgtgctgttgaagcatctgcagcgccagtgcgccattatctgcgacgcgttgcaagagcgcagcgatgtgcccctcgccatagcggatgtcagccttgcctacgaacgccacctgttctcaccgcgcgtaccccccaaacgccaagaaaacggcacatgcgagcccaacccgcgcctcaacttctaccccgtatttgccgtgccagaggtgcttgccacctatcacatctttttccaaaactgcaagatacccctatcctgccgtgccaaccgcagccgagcggacaagcagctggccttgcggcagggcgctgtcatacctgatatcgcctcgctcgacgaagtgccaaaaatctttgagggtcttggacgcgacgagaaacgcgcggcaaacgctctgcaacaagaaaacagcgaaaatgaaagtcactgtggagtgctggtggaacttgagggtgacaacgcgcgcctagccgtgctgaaacgcagcatcgaggtcacccactttgcctacccggcacttaacctaccccccaaggttatgagcacagtcatgagcgagctgatcgtgcgccgtgcacgacccctggagagggatgcaaacttgcaagaacaaaccgaggagggcctacccgcagttggcgatgagcagctggcgcgctggcttgagacgcgcgagcctgccgacttggaggagcgacgcaagctaatgatggccgcagtgcttgttaccgtggagcttgagtgcatgcagcggttctttgctgacccggagatgcagcgcaagctagaggaaacgttgcactacacctttcgccagggctacgtgcgccaggcctgcaaaatttccaacgtggagctctgcaacctggtctcctaccttggaattttgcacgaaaaccgcctcgggcaaaacgtgcttcattccacgctcaagggcgaggcgcgccgcgactacgtccgcgactgcgtttacttatttctgtgctacacctggcaaacggccatgggcgtgtggcagcaatgcctggaggagcgcaacctaaaggagctgcagaagctgctaaagcaaaacttgaaggacctatggacggccttcaacgagcgctccgtggccgcgcacctggcggacattatcttccccgaacgcctgcttaaaaccctgcaacagggtctgccagacttcaccagtcaaagcatgttgcaaaactttaggaactttatcctagagcgttcaggaattctgcccgccacctgctgtgcgcttcctagcgactttgtgcccattaagtaccgtgaatgccctccgccgctttggggtcactgctaccttctgcagctagccaactaccttgcctaccactccgacatcatggaagacgtgagcggtgacggcctactggagtgtcactgtcgctgcaacctatgcaccccgcaccgctccctggtctgcaattcgcaactgcttagcgaaagtcaaattatcggtacctttgagctgcagggtccctcgcctgacgaaaagtccgcggctccggggttgaaactcactccggggctgtggacgtcggcttaccttcgcaaatttgtacctgaggactaccacgcccacgagattaggttctacgaagaccaatcccgcccgccaaatgcggagcttaccgcctgcgtcattacccagggccacatccttggccaattgcaagccatcaacaaagcccgccaagagtttctgctacgaaagggacggggggtttacctggacccccagtccggcgaggagctcaacccaatccccccgccgccgcagccctatcagcagccgcgggcccttgcttcccaggatggcacccaaaaagaagctgcagctgccgccgccgccacccacggacgaggaggaatactgggacagtcaggcagaggaggttttggacgaggaggaggagatgatggaagactgggacagcctagacgaagcttccgaggccgaagaggtgtcagacgaaacaccgtcaccctcggtcgcattcccctcgccggcgccccagaaattggcaaccgttcccagcatcgctacaacctccgctcctcaggcgccgccggcactgcctgttcgccgacccaaccgtagatgggacaccactggaaccagggccggtaagtctaagcagccgccgccgttagcccaagagcaacaacagcgccaaggctaccgctcgtggcgcgggcacaagaacgccatagttgcttgcttgcaagactgtgggggcaacatctccttcgcccgccgctttcttctctaccatcacggcgtggccttcccccgtaacatcctgcattactaccgtcatctctacagcccctactgcaccggcggcagcggcagcggcagcaacagcagcggtcacacagaagcaaaggcgaccggatagcaagactctgacaaagcccaagaaatccacagcggcggcagcagcaggaggaggagcgctgcgtctggcgcccaacgaacccgtatcgacccgcgagcttagaaataggatttttcccactctgtatgctatatttcaacaaagcaggggccaagaacaagagctgaaaataaaaaacaggtctctgcgctccctcacccgcagctgcctgtatcacaaaagcgaagatcagcttcggcgcacgctggaagacgcggaggctctcttcagcaaatactgcgcgctgactcttaaggactagtttcgcgccctttctcaaatttaagcgcgaaaactacgtcatctccagcggccacacccggcgccagcacctgtcgtcagcgccattatgagcaaggaaattcccacgccctacatgtggagttaccagccacaaatgggacttgcggctggagctgcccaagactactcaacccgaataaactacatgagcgcgggaccccacatgatatcccgggtcaacggaatccgcgcccaccgaaaccgaattctcctcgaacaggcggctattaccaccacacctcgtaataaccttaatccccgtagttggcccgctgccctggtgtaccaggaaagtcccgctcccaccactgtggtacttcccagagacgcccaggccgaagttcagatgactaactcaggggcgcagcttgcgggcggctttcgtcacagggtgcggtcgcccgggcgttttagggcggagtaacttgcatgtattgggaattgtagtttttttaaaatgggaagtgacgtatcgtgggaaaacggaagtgaagatttgaggaagttgtgggttttttggctttcgtttctgggcgtaggttcgcgtgcggttttctgggtgttttttgtggactttaaccgttacgtcattttttagtcctatatatactcgctctgtacttggccctttttacactgtgactgattgagctggtgccgtgtcgagtggtgttttttaataggtttttttactggtaaggctgactgttatggctgccgctgtggaagcgctgtatgttgttctggagcgggagggtgctattttgcctaggcaggagggtttttcaggtgtttatgtgtttttctctcctattaattttgttatacctcctatgggggctgtaatgttgtctctacgcctgcgggtatgtattcccccgggctatttcggtcgctttttagcactgaccgatgttaaccaacctgatgtgtttaccgagtcttacattatgactccggacatgaccgaggaactgtcggtggtgctttttaatcacggtgaccagtttttttacggtcacgccggcatggccgtagtccgtcttatgcttataagggttgtttttcctgttgtaagacaggcttctaatgtttaaatgtttttttttttgttattttattttgtgtttaatgcaggaacccgcagacatgtttgagagaaaaatggtgtctttttctgtggtggttccggaacttacctgcctttatctgcatgagcatgactacgatgtgcttgcttttttgcgcgaggctttgcctgattttttgagcagcaccttgcattttatatcgccgcccatgcaacaagcttacataggggctacgctggttagcatagctccgagtatgcgtgtcataatcagtgtgggttcttttgtcatggttcctggcggggaagtggccgcgctggtccgtgcagacctgcacgattatgttcagctggccctgcgaagggacctacgggatcgcggtatttttgttaatgttccgcttttgaatcttatacaggtctgtgaggaacctgaatttttgcaatcatgattcgctgcttgaggctgaaggtggagggcgctctggagcagatttttacaatggccggacttaatattcgggatttgcttagagacatattgataaggtggcgagatgaaaattatttgggcatggttgaaggtgctggaatgtttatagaggagattcaccctgaagggtttagcctttacgtccacttggacgtgagggcagtttgccttttggaagccattgtgcaacatcttacaaatgccattatctgttctttggctgtagagtttgaccacgccaccggaggggagcgcgttcacttaatagatcttcattttgaggttttggataatcttttggaataaaaaaaaaaaaacatggttcttccagctcttcccgctcctcccgtgtgtgactcgcagaacgaatgtgtaggttggctgggtgtggcttattctgcggtggtggatgttatcagggcagcggcgcatgaaggagtttacatagaacccgaagccagggggcgcctggatgctttgagagagtggatatactacaactactacacagagcgagctaagcgacgagaccggagacgcagatctgtttgtcacgcccgcacctggttttgcttcaggaaatatgactacgtccggcgttccatttggcatgacactacgaccaacacgatctcggttgtctcggcgcactccgtacagtagggatcgcctacctccttttgagacagagacccgcgctaccatactggaggatcatccgctgctgcccgaatgtaacactttgacaatgcacaacgtgagttacgtgcgaggtcttccctgcagtgtgggatttacgctgattcaggaatgggttgttccctgggatatggttctgacgcgggaggagcttgtaatcctgaggaagtgtatgcacgtgtgcctgtgttgtgccaacattgatatcatgacgagcatgatgatccatggttacgagtcctgggctctccactgtcattgttccagtcccggttccctgcagtgcatagccggcgggcaggttttggccagctggtttaggatggtggtggatggcgccatgtttaatcagaggtttatatggtaccgggaggtggtgaattacaacatgccaaaagaggtaatgtttatgtccagcgtgtttatgaggggtcgccacttaatctacctgcgcttgtggtatgatggccacgtgggttctgtggtccccgccatgagctttggatacagcgccttgcactgtgggattttgaacaatattgtggtgctgtgctgcagttactgtgctgatttaagtgagatcagggtgcgctgctgtgcccggaggacaaggcgtctcatgctgcgggcggtgcgaatcatcgctgaggagaccactgccatgttgtattcctgcaggacggagcggcggcggcagcagtttattcgcgcgctgctgcagcaccaccgccctatcctgatgcacgattatgactctacccccatgtaggcgtggacttccccttcgccgcccgttgagcaaccgcaagttggacagcagcctgtggctcagcagctggacagcgacatgaacttaagcgagctgcccggggagtttattaatatcactgatgagcgtttggctcgacaggaaaccgtgtggaatataacacctaagaatatgtctgttacccatgatatgatgctttttaaggccagccggggagaaaggactgtgtactctgtgtgttgggagggaggtggcaggttgaatactagggttctgtgagtttgattaaggtacggtgatcaatataagctatgtggtggtggggctatactactgaatgaaaaatgacttgaaattttctgcaattgaaaaataaacacgttgaaacataacatgcaacaggttcacgattctctagtgaatccacagaaactagcgaggtaagcacttactctatgtcttttacatggtcctgggaaagtggaaaatacaccactgaaacttttgctaccaactcttacaccttctcctacattgcccaggaataaaatcgatgtaggatgttgcccctcctgacgcggtaggagaaggggagggtgccctgcatgtctgccgctgctcttgctcttgccgctgctgaggaggggggcgcatctgccgcagcaccggatgcatctgggaaaagcaaaaaaggggctcgtccctgtttccggaggaatttgcaagcggggtcttgcatgacggggaggcaaacccccgttcgccgcagtccggccggcccgagactcgaaccgggggtcctgcgactcaacccttggaaaataaccctccggctacagggagcgagccacttaatgctttcgctttccagcctaaccgcttacgccgcgcgcggccagtggccaaaaaagctagcgcagcagccgccgcgcctggaaggaagccaaaaggagcgctcccccgttgtctgacgtcgcacacctgggttcgacacgcgggcggtaaccgcatggatcacggcggacggccggatccggggttcgaaccccggtcgtccgccatgatacccttgcgaatttatccaccagaccacggaagagtgcccgcttacaggctctccttttgcacggtctagagcgtcaacgactgcgcacgcctcaccggccagagcgtcccgaccatggagcactttttgccgctgcgcaacatctggaaccgcgtccgcgactttccgcgcgcctccaccaccgccgccggcatcacctggatgtccaggtacatctacggattacgtcgacgtttaaaccatatgatcagctcactcaaaggcggtaatacggttatccacagaatcaggggataacgcaggaaagaacatgtgagcaaaaggccagcaaaaggccaggaaccgtaaaaaggccgcgttgctggcgtttttccataggctccgcccccctgacgagcatcacaaaaatcgacgctcaagtcagaggtggcgaaacccgacaggactataaagataccaggcgtttccccctggaagctccctcgtgcgctctcctgttccgaccctgccgcttaccggatacctgtccgcctttctcccttcgggaagcgtggcgctttctcatagctcacgctgtaggtatctcagttcggtgtaggtcgttcgctccaagctgggctgtgtgcacgaaccccccgttcagcccgaccgctgcgccttatccggtaactatcgtcttgagtccaacccggtaagacacgacttatcgccactggcagcagccactggtaacaggattagcagagcgaggtatgtaggcggtgctacagagttcttgaagtggtggcctaactacggctacactagaagaacagtatttggtatctgcgctctgctgaagccagttaccttcggaaaaagagttggtagctcttgatccggcaaacaaaccaccgctggtagcggtggtttttttgtttgcaagcagcagattacgcgcagaaaaaaaggatctcaagaagatcctttgatcttttctacggggtctgacgctcagtggaacgaaaactcacgttaagggattttggtcatgagattatcaaaaaggatcttcacctagatccttttaaattaaaaatgaagttttaaatcaatctaaagtatatatgagtaaacttggtctgacagttaccaatgcttaatcagtgaggcacctatctcagcgatctgtctatttcgttcatccatagttgcctgactccccgtcgtgtagataactacgatacgggagggcttaccatctggccccagtgctgcaatgataccgcgagacccacgctcaccggctccagatttatcagcaataaaccagccagccggaagggccgagcgcagaagtggtcctgcaactttatccgcctccatccagtctattaattgttgccgggaagctagagtaagtagttcgccagttaatagtttgcgcaacgttgttgccattgctacaggcatcgtggtgtcacgctcgtcgtttggtatggcttcattcagctccggttcccaacgatcaaggcgagttacatgatcccccatgttgtgcaaaaaagcggttagctccttcggtcctccgatcgttgtcagaagtaagttggccgcagtgttatcactcatggttatggcagcactgcataattctcttactgtcatgccatccgtaagatgcttttctgtgactggtgagtactcaaccaagtcattctgagaatagtgtatgcggcgaccgagttgctcttgcccggcgtcaatacgggataataccgcgccacatagcagaactttaaaagtgctcatcattggaaaacgttcttcggggcgaaaactctcaaggatcttaccgctgttgagatccagttcgatgtaacccactcgtgcacccaactgatcttcagcatcttttactttcaccagcgtttctgggtgagcaaaaacaggaaggcaaaatgccgcaaaaaagggaataagggcgacacggaaatgttgaatactcatactcttcctttttcaatattattgaagcatttatcagggttattgtctcatgagcggatacatatttgaatgtatttagaaaaataaacaaataggggttccgcgcacatttccccgaaaagtgccacctaaattgtaagcgttaatattttgttaaaattcgcgttaaatttttgttaaatcagctcattttttaaccaataggccgaaatcggcaaaatcccttataaatcaaaagaatagaccgagatagggttgagtgttgttccagtttggaacaagagtccactattaaagaacgtggactccaacgtcaaagggcgaaaaaccgtctatcagggcgatggcccactacgtgaaccatcaccctaatcaagttttttggggtcgaggtgccgtaaagcactaaatcggaaccctaaagggagcccccgatttagagcttgacggggaaagccggcgaacgtggcgagaaaggaagggaagaaagcgaaaggagcgggcgctagggcgctggcaagtgtagcggtcacgctgcgcgtaaccaccacacccgccgcgcttaatgcgccgctacagggcgcgatggatcc

SEQ ID NO: 106 - DNA, 18932 bp, Artificial Sequence
  Description of Artificial Sequence: Synthetic polynucleotide
tcttccgcttcctcgctcactgactcgctgcgctcggtcgttcggctgcggcgagcggtatcagctcactcaaaggcggtaatacggttatccacagaatcaggggataacgcaggaaagaacatgtgagcaaaaggccagcaaaaggccaggaaccgtaaaaaggccgcgttgctggcgtttttccataggctccgcccccctgacgagcatcacaaaaatcgacgctcaagtcagaggtggcgaaacccgacaggactataaagataccaggcgtttccccctggaagctccctcgtgcgctctcctgttccgaccctgccgcttaccggatacctgtccgcctttctcccttcgggaagcgtggcgctttctcatagctcacgctgtaggtatctcagttcggtgtaggtcgttcgctccaagctgggctgtgtgcacgaaccccccgttcagcccgaccgctgcgccttatccggtaactatcgtcttgagtccaacccggtaagacacgacttatcgccactggcagcagccactggtaacaggattagcagagcgaggtatgtaggcggtgctacagagttcttgaagtggtggcctaactacggctacactagaagaacagtatttggtatctgcgctctgctgaagccagttaccttcggaaaaagagttggtagctcttgatccggcaaacaaaccaccgctggtagcggtggtttttttgtttgcaagcagcagattacgcgcagaaaaaaaggatctcaagaagatcctttgatcttttctacggggtctgacgctcagtggaacgaaaactcacgttaagggattttggtcatgagattatcaaaaaggatcttcacctagatccttttaaattaaaaatgaagttttaaatcaatctaaagtatatatgagtaaacttggtctgacagttaccaatgcttaatcagtgaggcacctatctcagcgatctgtctatttcgttcatccatagttgcctgactccccgtcgtgtagataactacgatacgggagggcttaccatctggccccagtgctgcaatgataccgcgagacccacgctcaccggctccagatttatcagcaataaaccagccagccggaagggccgagcgcagaagtggtcctgcaactttatccgcctccatccagtctattaattgttgccgggaagctagagtaagtagttcgccagttaatagtttgcgcaacgttgttgccattgctacaggcatcgtggtgtcacgctcgtcgtttggtatggcttcattcagctccggttcccaacgatcaaggcgagttacatgatcccccatgttgtgcaaaaaagcggttagctccttcggtcctccgatcgttgtcagaagtaagttggccgcagtgttatcactcatggttatggcagcactgcataattctcttactgtcatgccatccgtaagatgcttttctgtgactggtgagtactcaaccaagtcattctgagaatagtgtatgcggcgaccgagttgctcttgcccggcgtcaatacgggataataccgcgccacatagcagaactttaaaagtgctcatcattggaaaacgttcttcggggcgaaaactctcaaggatcttaccgctgttgagatccagttcgatgtaacccactcgtgcacccaactgatcttcagcatcttttactttcaccagcgtttctgggtgagcaaaaacaggaaggcaaaatgccgcaaaaaagggaataagggcgacacggaaatgttgaatactcatactcttcctttttcaatattattgaagcatttatcagggttattgtctcatgagcggatacatatttgaatgtatttagaaaaataaacaaataggggttccgcgcacatttccccgaaaagtgccacctgacgtctaagaaaccattattatcatgacattaacctataaaaataggcgtatcacgaggccctttcgtctcgcgcgtttcggtgatgacggtgaaaacctctgacacatgcagctcccggagacggtcacagcttgtctgtaagcggatgccgggagcagacaagcccgtcagggcgcgtcagcgggtgttggcgggtgtcggggctggcttaactatgcggcatcagagcagattgtactgagagtgcaccataaaattgtaaacgttaatattttgttaaaattcgcgttaaatttttgttaaatcagctcattttttaaccaataggccgaaatcggcaaaatcccttataaatcaaaagaatagcccgagatagggttgagtgttgttccagtttggaacaagagtccactattaaagaacgtggactccaacgtcaaagggcgaaaaaccgtctatcagggcgatggcccactacgtgaaccatcacccaaatcaagttttttggggtcgaggtgccgtaaagcactaaatcggaaccctaaagggagcccccgatttagagcttgacggggaaagccggcgaacgtggcgagaaaggaagggaagaaagcgaaaggagcgggcgctagggcgctggcaagtgtagcggtcacgctgcgcgtaaccaccacacccgccgcgcttaatgcgccgctacagggcgcgtactatggttgctttgacgtatgcggtgtgaaataccgcacagatgcgtaaggagaaaataccgcatcaggcgccattcgccattcaggctgcgcaactgttgggaagggcgatcggtgcgggcctcttcgctattacgccagctggcgaaagggggatgtgctgcaaggcgattaagttgggtaacgccagggttttcccagtcacgacgttgtaaaacgacggccagtgccaagcttaaggtgcacggcccacgtggccactagtacttctcgacagaagcaccatgtccttgggtccggcctgctgaatgcgcaggcggtcggccatgccccaggcttcgttttgacatcggcgcaggtctttgtagtagtcttgcatgagcctttctaccggcacttcttcttctccttcctcttgtcctgcatctcttgcatctatcgctgcggcggcggcggagtttggccgtaggtggcgccctcttcctcccatgcgtgtgaccccgaagcccctcatcggctgaagcagggctaggtcggcgacaacgcgctcggctaatatggcctgctgcacctgcgtgagggtagactggaagtcatccatgtccacaaagcggtggtatgcgcccgtgttgatggtgtaagtgcagttggccataacggaccagttaacggtctggtgacccggctgcgagagctcggtgtacctgagacgcgagtaagccctcgagtcaaatacgtagtcgttgcaagtccgcaccaggtactggtatcccaccaaaaagtgcggcggcggctggcggtagaggggccagcgtagggtggccggggctccgggggcgagatcttccaacataaggcgatgatatccgtagatgtacctggacatccaggtgatgccggcggcggtggtggaggcgcgcggaaagtcgcggacgcggttccagatgttgcgcagcggcaaaaagtgctccatggtcgggacgctctggccggtcaggcgcgcgcaatcgttgacgctctaccgtgcaaaaggagagcctgtaagcgggcactcttccgtggtctggtggataaattcgcaagggtatcatggcggacgaccggggttcgagccccgtatccggccgtccgccgtgatccatgcggttaccgcccgcgtgtcgaacccaggtgtgcgacgtcagacaacgggggagtgctccttttggcttccttccaggcgcggcggctgctgcgctagcttttttggccactggccgcgcgcagcgtaagcggttaggctggaaagcgaaagcattaagtggctcgctccctgtagccggagggttattttccaagggttgagtcgcgggacccccggttcgagtctcggaccggccggactgcggcgaacgggggtttgcctccccgtcatgcaagaccccgcttgcaaattcctccggaaacagggacgagccccttttttgcttttcccagatgcatccggtgctgcggcagatgcgcccccctcctcagcagcggcaagagcaagagcagcggcagacatgcagggcaccctcccctcctcctaccgcgtcaggaggggcgacatccgcggttgacgcggcagcagatggtgattacgaacccccgcggcgccgggcccggcactacctggacttggaggagggcgagggcctggcgcggctaggagcgccctctcctgagcggtacccaagggtgcagctgaagcgtgatacgcgtgaggcgtacgtgccgcggcagaacctgtttcgcgaccgcgagggagaggagcccgaggagatgcgggatcgaaagttccacgcagggcgcgagctgcggcatggcctgaatcgcgagcggttgctgcgcgaggaggactttgagcccgacgcgcgaaccgggattagtcccgcgcgcgcacacgtggcggccgccgacctggtaaccgcatacgagcagacggtgaaccaggagattaactttcaaaaaagctttaacaaccacgtgcgtacgcttgtggcgcgcgaggaggtggctataggactgatgcatctgtgggactttgtaagcgcgctggagcaaaacccaaatagcaagccgctcatggcgcagctgttccttatagtgcagcacagcagggacaacgaggcattcagggatgcgctgctaaacatagtagagcccgagggccgctggctgctcgatttgataaacatcctgcagagcatagtggtgcaggagcgcagcttgagcctggctgacaaggtggccgccatcaactattccatgcttagcctgggcaagttttacgcccgcaagatataccataccccttacgttcccatagacaaggaggtaaagatcgaggggttctacatgcgcatggcgctgaaggtgcttaccttgagcgacgacctgggcgtttatcgcaacgagcgcatccacaaggccgtgagcgtgagccggcggcgcgagctcagcgaccgcgagctgatgcacagcctgcaaagggccctggctggcacgggcagcggcgatagagaggccgagtcctactttgacgcgggcgctgacctgcgctgggccccaagccgacgcgccctggaggcagctggggccggacctgggctggcggtggcacccgcgcgcgctggcaacgtcggcggcgtggaggaatatgacgaggacgatgagtacgagccagaggacggcgagtactaagcggtgatgtttctgatcagatgatgcaagacgcaacggacccggcggtgcgggcggcgctgcagagccagccgtccggccttaactccacggacgactggcgccaggtcatggaccgcatcatgtcgctgactgcgcgcaatcctgacgcgttccggcagcagccgcaggccaaccggctctccgcaattctggaagcggtggtcccggcgcgcgcaaaccccacgcacgagaaggtgctggcgatcgtaaacgcgctggccgaaaacagggccatccggcccgacgaggccggcctggtctacgacgcgctgcttcagcgcgtggctcgttacaacagcggcaacgtgcagaccaacctggaccggctggtgggggatgtgcgcgaggccgtggcgcagcgtgagcgcgcgcagcagcagggcaacctgggctccatggttgcactaaacgccttcctgagtacacagcccgccaacgtgccgcggggacaggaggactacaccaactttgtgagcgcactgcggctaatggtgactgagacaccgcaaagtgaggtgtaccagtctgggccagactattttttccagaccagtagacaaggcctgcagaccgtaaacctgagccaggctttcaaaaacttgcaggggctgtggggggtgcgggctcccacaggcgaccgcgcgaccgtgtctagcttgctgacgcccaactcgcgcctgttgctgctgctaatagcgcccttcacggacagtggcagcgtgtcccgggacacatacctaggtcacttgctgacactgtaccgcgaggccataggtcaggcgcatgtggacgagcatactttccaggagattacaagtgtcagccgcgcgctggggcaggaggacacgggcagcctggaggcaaccctaaactacctgctgaccaaccggcggcagaagatcccctcgttgcacagtttcgcaccctttggcgcatcccattctccagtaactttatgtccatgggcgcactcacagacctgggccaaaaccttctctacgccaactccgcccacgcgctagacatgacttttgaggtggatcccatggacgagcccacccttctttatgttttgtttgaagtctttgacgtggtccgtgtgcaccggccgcaccgcggcgtcatcgaaaccgtgtacctgcgcacgcccttctcggccggcaacgccacaacataaagaagcaagcaacatcaacaacagctgccgccatgggctccagtgagcaggaactgaaagccattgtcaaagatcttggttgtgggccatattttttgggcacctatgacaagcgctttccaggctttgtttctccacacaagctcgcctgcgccatagtcaatacggccggtcgcgagactgggggcgtacactggatggcctttgcctggaacccgcactcaaaaacatgctacctctttgagccctttggcttttctgaccagcgactcaagcaggtttaccagtttgagtacgagtcactcctgcgccgtagcgccattgcttcttcccccgaccgctgtataacgctggaaaagtccacccaaagcgtacaggggcccaactcggccgcctgtggactattctgctgcatgtttctccacgcctttgccaactggccccaaactcccatggatcacaaccccaccatgaaccttattaccggggtacccaactccatgctcaacagtccccaggtacagcccaccctgcgtcgcaaccaggaacagctctacagcttcctggagcgccactcgccctacttccgcagccacagtgcgcagattaggagcgccacttctttttgtcacttgaaaaacatgtaaaaataatgtactagagacactttcaataaaggcaaatgcttttatttgtacactctcgggtgattatttacccccacccttgccgtctgcgccgtttaaaaatcaaaggggttctgccgcgcatcgctatgcgccactggcagggacacgttgcgatactggtgtttagtgctccacttaaactcaggcacaaccatccgcggcagctcggtgaagttttcactccacaggctgcgcaccatcaccaacgcgtttagcaggtcgggcgccgatatcttgaagtcgcagttggggcctccgccctgcgcgcgcgagttgcgatacacagggttgcagcactggaacactatcagcgccgggtggtgcacgctggccagcacgctcttgtcggagatcagatccgcgtccaggtcctccgcgttgctcagggcgaacggagtcaactttggtagctgccttcccaaaaagggcgcgtgcccaggctttgagttgcactcgcaccgtagtggcatcaaaaggtgaccgtgcccggtctgggcgttaggatacagcgcctgcataaaagccttgatctgcttaaaagccacctgagcctttgcgccttcagagaagaacatgccgcaagacttgccggaaaactgattggccggacaggccgcgtcgtgcacgcagcaccttgcgtcggtgttggagatctgcaccacatttcggccccaccggttcttcacgatcttggccttgctagactgctccttcagcgcgcgctgcccgttttcgctcgtcacatccatttcaatcacgtgctccttatttatcataatgcttccgtgtagacacttaagctcgccttcgatctcagcgcagcggtgcagccacaacgcgcagcccgtgggctcgtgatgcttgtaggtcacctctgcaaacgactgcaggtacgcctgcaggaatcgccccatcatcgtcacaaaggtcttgttgctggtgaaggtcagctgcaacccgcggtgctcctcgttcagccaggtcttgcatacggccgccagagcttccacttggtcaggcagtagtttgaagttcgcctttagatcgttatccacgtggtacttgtccatcagcgcgcgcgcagcctccatgcccttctcccacgcagacacgatcggcacactcagcgggttcatcaccgtaatttcactttccgcttcgctgggctcttcctcttcctcttgcgtccgcataccacgcgccactgggtcgtcttcattcagccgccgcactgtgcgcttacctcctttgccatgcttgattagcaccggtgggttgctgaaacccaccatttgtagcgccacatcttctctttcttcctcgctgtccacgattacctctggtgatggcgggcgctcgggcttgggagaagggcgcttctttttcttcttgggcgcaatggccaaatccgccgccgaggtcgatggccgcgggctgggtgtgcgcggcaccagcgcgtcttgtgatgagtcttcctcgtcctcggactcgatacgccgcctcatccgcttttttgggggcgcccggggaggcggcggcgacggggacggggacgacacgtcctccatggttgggggacgtcgcgccgcaccgcgtccgcgctcgggggtggtttcgcgctgctcctcttcccgactggccatttccttctcctataggcagaaaaagatcatggagtcagtcgagaagaaggacagcctaaccgccccctctgagttcgccaccaccgcctccaccgatgccgccaacgcgcctaccaccttccccgtcgaggcacccccgcttgaggaggaggaagtgattatcgagcaggacccaggttttgtaagcgaagacgacgaggaccgctcagtaccaacagaggataaaaagcaagaccaggacaacgcagaggcaaacgaggaacaagtcgggcggggggacgaaaggcatggcgactacctagatgtgggagacgacgtgctgttgaagcatctgcagcgccagtgcgccattatctgcgacgcgttgcaagagcgcagcgatgtgcccctcgccatagcggatgtcagccttgcctacgaacgccacctattctcaccgcgcgtaccccccaaacgccaagaaaacggcacatgcgagcccaacccgcgcctcaacttctaccccgtatttgccgtgccagaggtgcttgccacctatcacatctttttccaaaactgcaagatacccctatcctgccgtgccaaccgcagccgagcggacaagcagctggccttgcggcagggcgctgtcatacctgatatcgcctcgctcaacgaagtgccaaaaatctttgagggtcttggacgcgacgagaagcgcgcggcaaacgctctgcaacaggaaaacagcgaaaatgaaagtcactctggagtgttggtggaactcgagggtgacaacgcgcgcctagccgtactaaaacgcagcatcgaggtcacccactttgcctacccggcacttaacctaccccccaaggtcatgagcacagtcatgagtgagctgatcgtgcgccgtgcgcagcccctggagagggatgcaaatttgcaagaacaaacagaggagggcctacccgcagttggcgacgagcagctagcgcgctggcttcaaacgcgcgagcctgccgacttggaggagcgacgcaaactaatgatggccgcagtgctcgttaccgtggagcttgagtgcatgcagcggttctttgctgacccggagatgcagcgcaagctagaggaaacattgcactacacctttcgacagggctacgtacgccaggcctgcaagatctccaacgtggagctctgcaacctggtctcctaccttggaattttgcacgaaaaccgccttgggcaaaacgtgcttcattccacgctcaagggcgaggcgcgccgcgactacgtccgcgactgcgtttacttatttctatgctacacctggcagacggccatgggcgtttggcagcagtgcttggaggagtgcaacctcaaggagctgcagaaactgctaaagcaaaacttgaaggacctatggacggccttcaacgagcgctccgtggccgcgcacctggcggacatcattttccccgaacgcctgcttaaaaccctgcaacagggtctgccagacttcaccagtcaaagcatgttgcagaactttaggaactttatcctagagcgctcaggaatcttgcccgccacctgctgtgcacttcctagcgactttgtgcccattaagtaccgcgaatgccctccgccgctttggggccactgctaccttctgcagctagccaactaccttgcctaccactctgacataatggaagacgtgagcggtgacggtctactggagtgtcactgtcgctgcaacctatgcaccccgcaccgctccctggtttgcaattcgcagctgcttaacgaaagtcaaattatcggtacctttgagctgcagggtccctcgcctgacgaaaagtccgcggctccggggttgaaactcactccggggctgtggacgtcggcttaccttcgcaaatttgtacctgaggactaccacgcccacgagattaggttctacgaagaccaatcccgcccgccaaatgcggagcttaccgcctgcgtcattacccagggccacattcttggccaattgcaagccatcaacaaagcccgccaagagtttctgctacgaaagggacggggggtttacttggacccccagtccggcgaggagctcaacccaatccccccgccgccgcagccctatcagcagcagccgcgggcccttgcttcccaggatggcacccaaaaagaagctgcagctgccgccgccacccacggacgaggaggaatactgggacagtcaggcagaggaggttttggacgaggaggaggaggacatgatggaagactgggagagcctagacgaggaagcttccgaggtcgaagaggtgtcagacgaaacaccgtcaccctcggtcgcattcccctcgccggcgccccagaaatcggcaaccggttccagcatggctacaacctccgctcctcaggcgccgccggcactgcccgttcgccgacccaaccgtagatgggacaccactggaaccagggccggtaagtccaagcagccgccgccgttagcccaagagcaacaacagcgccaaggctaccgctcatggcgcgggcacaagaacgccatagttgcttgcttgcaagactgtgggggcaacatctccttcgcccgccgctttcttctctaccatcacggcgtggccttcccccgtaacatcctgcattactaccgtcatctctacagcccatactgcaccggcggcagcggcagcggcagcaacagcagcggccacacagaagcaaaggcgaccggatagcaagactctgacaaagcccaagaaatccacagcggcggcagcagcaggaggaggagcgctgcgtctggcgcccaacgaacccgtatcgacccgcgagcttagaaacaggatttttcccactctgtatgctatatttcaacagagcaggggccaagaacaagagctgaaaataaaaaacaggtctctgcgatccctcacccgcagctgcctgtatcacaaaagcgaagatcagcttcggcgcacgctggaagacgcggaggctctcttcagtaaatactgcgcgctgactcttaaggactagtttcgcgccctttctcaaatttaagcgcgaaaactacgtcatctccagcggccacacccggcgccagcacctgtcgtcagcgccattatgagcaaggaaattcccacgccctacatgtggagttaccagccacaaatgggacttgcggctggagctgcccaagactactcaacccgaataaactacatgagcgcgggaccccacatgatatcccgggtcaacggaatccgcgcccaccgaaaccgaattctcttggaacaggcggctattaccaccacacctcgtaataaccttaatccccgtagttggcccgctgccctggtgtaccaggaaagtcccgctcccaccactgtggtacttcccagagacgcccaggccgaagttcagatgactaactcaggggcgcagcttgcgggcggctttcgtcacagggtgcggtcgcccgggcagggtataactcacctgacaatcagagggcgaggtattcagctcaacgacgagtcggtgagctcctcgcttggtctccgtccggacgggacatttcagatcggcggcgccggccgtccttcattcacgcctcgtcaggcaatcctaactctgcagacctcgtcctctgagccgcgctctggaggcattggaactctgcaatttattgaggagtttgtgccatcggtctactttaaccccttctcgggacctcccggccactatccggatcaatttattcctaactttgacgcggtaaaggactcggcggacggctacgactgaatgttaagtggagaggcagagcaactgcgcctgaaacacctggtccactgtcgccgccacaagtgctttgcccgcgactccggtgagttttgctactttgaattgcccgaggatcatatcgagggcccggcgcacggcgtccggcttaccgcccagggagagcttgcccgtagcctgattcgggagtttacccagcgccccctgctagttgagcgggacaggggaccctgtgttctcactgtgatttgcaactgtcctaaccttggattacatcaagatcctctagttaattaactagagtacccggggatcttattccctttaactaataaaaaaaaataataaagcatcacttacttaaaatcagttagcaaatttctgtccagtttattcagcagcacctccttgccctcctcccagctctggtattgcagcttcctcctggctgcaaactttctccacaatctaaatggaatgtcagtttcctcctgttcctgtccatccgcacccactatcttcatgttgttgcagatgaagcgcgcaagaccgtctgaagataccttcaaccccgtgtatccatatgacacggaaaccggtcctccaactgtgccttttcttactcctccctttgtatcccccaatgggtttcaagagagtccccctggggtactctctttgcgcctatccgaacctctagttacctccaatggcatgcttgcgctcaaaatgggcaacggcctctctctggacgaggccggcaaccttacctcccaaaatgtaaccactgtgagcccacctctcaaaaaaaccaagtcaaacataaacctggaaatatctgcacccctcacagttacctcagaagccctaactgtggctgccgccgcacctctaatggtcgcgggcaacacactcaccatgcaatcacaggccccgctaaccgtgcacgactccaaacttagcattgccacccaaggacccctcacagtgtcagaaggaaagctagccctgcaaacatcaggccccctcaccaccaccgatagcagtacccttactatcactgcctcaccccctctaactactgccactggtagcttgggcattgacttgaaagagcccatttatacacaaaatggaaaactaggactaaagtacggggctcctttgcatgtaacagacgacctaaacactttgaccgtagcaactggtccaggtgtgactattaataatacttccttgcaaactaaagttactggagccttgggttttgattcacaaggcaatatgcaacttaatgtagcaggaggactaaggattgattctcaaaacagacgccttatacttgatgttagttatccgtttgatgctcaaaaccaactaaatctaagactaggacagggccctctttttataaactcagcccacaacttggatattaactacaacaaaggcctttacttgtttacagcttcaaacaattccaaaaagcttgaggttaacctaagcactgccaaggggttgatgtttgacgctacagccatagccattaatgcaggagatgggcttgaatttggttcacctaatgcaccaaacacaaatcccctcaaaacaaaaattggccatggcctagaatttgattcaaacaaggctatggttcctaaactaggaactggccttagttttgacagcacaggtgccattacagtaggaaacaaaaataatgataagctaactttgtggaccacaccagctccatctcctaactgtagactaaatgcagagaaagatgctaaactcactttggtcttaacaaaatgtggcagtcaaatacttgctacagtttcagttttggctgttaaaggcagtttggctccaatatctggaacagttcaaagtgctcatcttattataagatttgacgaaaatggagtgctactaaacaattccttcctggacccagaatattggaactttagaaatggagatcttactgaaggcacagcctatacaaacgctgttggatttatgcctaacctatcagcttatccaaaatctcacggtaaaactgccaaaagtaacattgtcagtcaagtttacttaaacggagacaaaactaaacctgtaacactaaccattacactaaacggtacacaggaaacaggagacacaactccaagtgcatactctatgtcattttcatgggactggtctggccacaactacattaatgaaatatttgccacatcctcttacactttttcatacattgcccaagaataaagaatcgtttgtgttatgtttcaacgtgtttatttttcaattgcagaaaatttcaagtcatttttcattcagtagtatagccccaccaccacatagcttatacagatcaccgtaccttaatcaaactcacagaaccctagtattcaacctgccacctccctcccaacacacagagtacacagtcctttctccccggctggccttaaaaagcatcatatcatgggtaacagacatattcttaggtgttatattccacacggtttcctgtcgagccaaacgctcatcagtgatattaataaactccccgggcagctcacttaagttcatgtcgctgtccagctgctgagccacaggctgctgtccaacttgcggttgcttaacgggcggcgaaggagaagtccacgcctacatgggggtagagtcataatcgtgcatcaggatagggcggtggtgctgcagcagcgcgcgaataaactgctgccgccgccgctccgtcctgcaggaatacaacatggcagtggtctcctcagcgatgattcgcaccgcccgcagcataaggcgccttgtcctccgggcacagcagcgcaccctgatctcacttaaatcagcacagtaactgcagcacagcaccacaatattgttcaaaatcccacagtgcaaggcgctgtatccaaagctcatggcggggaccacagaacccacgtggccatcataccacaagcgcaggtagattaagtggcgacccctcataaacacgctggacataaacattacctcttttggcatgttgtaattcaccacctcccggtaccatataaacctctgattaaacatggcgccatccaccaccatcctaaaccagctggccaaaacctgcccgccggctatacactgcagggaaccgggactggaacaatgacagtggagagcccaggactcgtaaccatggatcatcatgctcgtcatgatatcaatgttggcacaacacaggcacacgtgcatacacttcctcaggattacaagctcctcccgcgttagaaccatatcccagggaacaacccattcctgaatcagcgtaaatcccacactgcagggaagacctcgcacgtaactcacgttgtgcattgtcaaagtgttacattcgggcagcagcggatgatcctccagtatggtagcgcgggtttctgtctcaaaaggaggtagacgatccctactgtacggagtgcgccgagacaaccgagatcgtgttggtcgtagtgtcatgccaaatggaacgccggacgtagtcatatttcctgaagcaaaaccaggtgcgggcgtgacaaacagatctgcgtctccggtctcgccgcttagatcgctctgtgtagtagttgtagtatatccactctctcaaagcatccaggcgccccctggcttcgggttctatgtaaactccttcatgcgccgctgccctgataacatccaccaccgcagaataagccacacccagccaacctacacattcgttctgcgagtcacacacgggaggagcgggaagagctggaagaaccatgtttttttttttattccaaaagattatccaaaacctcaaaatgaagatctattaagtgaacgcgctcccctccggtggcgtggtcaaactctacagccaaagaacagataatggcatttgtaagatgttgcacaatggcttccaaaaggcaaacggccctcacgtccaagtggacgtaaaggctaaacccttcagggtgaatctcctctataaacattccagcaccttcaaccatgcccaaataattctcatctcgccaccttctcaatatatctctaagcaaatcccgaatattaagtccggccattgtaaaaatctgctccagagcgccctccaccttcagcctcaagcagcgaatcatgattgcaaaaattcaggttcctcacagacctgtataagattcaaaagcggaacattaacaaaaataccgcgatcccgtaggtcccttcgcagggccagctgaacataatcgtgcaggtctgcacggaccagcgcggccacttccccgccaggaaccttgacaaaagaacccacactgattatgacacgcatactcggagctatgctaaccagcgtagccccgatgtaagctttgttgcatgggcggcgatataaaatgcaaggtgctgctcaaaaaatcaggcaaagcctcgcgcaaaaaagaaagcacatcgtagtcatgctcatgcagataaaggcaggtaagctccggaaccaccacagaaaaagacaccatttttctctcaaacatgtctgcgggtttctgcataaacacaaaataaaataacaaaaaaacatttaaacattagaagcctgtcttacaacaggaaaaacaacccttataagcataagacggactacggccatgccggcgtgaccgtaaaaaaactggtcaccgtgattaaaaagcaccaccgacagctcctcggtcatgtccggagtcataatgtaagactcggtaaacacatcaggttgattcatcggtcagtgctaaaaagcgaccgaaatagcccgggggaatacatacccgcaggcgtagagacaacattacagcccccataggaggtataacaaaattaataggagagaaaaacacataaacacctgaaaaaccctcctgcctaggcaaaatagcaccctcccgctccagaacaacatacagcgcttccacagcggcagccataacagtcagccttaccagtaaaaaagaaaacctattaaaaaaacaccactcgacacggcaccagctcaatcagtcacagtgtaaaaaagggccaagtgcagagcgagtatatataggactaaaaaatgacgtaacggttaaagtccacaaaaaacacccagaaaaccgcacgcgaacctacgcccagaaacgaaagccaaaaaacccacaacttcctcaaatcgtcacttccgttttcccacgttacgtaacttcccattttaagaaaactacaattcccaacacatacaagttactccgccctaaaacctacgtcacccgccccgttcccacgccccgcgccacgtcacaaactccaccccctcattatcatattggcttcaatccaaaataaggtatattattgatgatttattttggattgaagccaatatgataatgagggggtggagtttgtgacgtggcgcggggcgtgggaacggggcgggtgacgtagtagtgtggcggaagtgtgatgttgcaagtgtggcggaacacatgtaagcgacggatgtggcaaaagtgacgtttttggtgtgcgccggatccacaggacgggtgtggtcgccatgatcgcgtagtcgatagtggctccaagtagcgaagcgagcaggactgggcggcggccaaagcggtcggacagtgctccgagaacgggtgcgcatagaaattgcatcaacgcatatagcgctagcagcacgccatagtgactggcgatgctgtcggaatggacgatatcccgcaagaggcccggcagtaccggcataaccaagcctatgcctacagcatccagggtgacggtgccgaggatgacgatgagcgcattgttagatttcatacacggtgcctgactgcgttagcaatttaactgtgataaactaccgcattaaagcttatcgaattcgtaatcatggtcatagctgtttcctgtgtgaaattgttatccgctcacaattccacacaacatacgagccggaagcataaagtgtaaagcctggggtgcctaatgagtgagctaactcacattaattgcgttgcgctcactgcccgctttccagtcgggaaacctgtcgtgccagctgcattaatgaatcggccaacgcgcggggagaggcggtttgcgtattgggcgc

1. An adenoviral helper plasmid comprising a nucleotide sequence encoding:
(a) E2a protein;
(b) an E4 region;
(c) a VA RNA region; and
(d) an L4 region;
wherein the adenoviral helper plasmid does not comprise a nucleotide sequence encoding one or more of:
a Fiber protein or portion thereof;
a L1-52/55K (Packaging Protein 3); and
a Peripentonal Hexon-Associated Protein.

2. The adenoviral helper plasmid of claim 1, wherein the VA RNA region comprises a nucleotide sequence that is at least 80% identical to SEQ ID NO: 14.

3. The adenoviral helper plasmid of claim 2, wherein the VA RNA region comprises:
(a) a VA RNAI nucleotide sequence that is at least 80% identical to SEQ ID NO: 16; and
(b) a VA RNAII nucleotide sequence that is at least 80% identical to SEQ ID NO: 18.

4. The adenoviral helper plasmid of claim 1, wherein the VA RNA region comprises a nucleotide sequence that is at least 80% identical to SEQ ID NO: 15.

5. The adenoviral helper plasmid of claim 4, wherein the VA RNA region comprises:
(a) a VA RNAI nucleotide sequence that is at least 80% identical to SEQ ID NO: 17; and
(b) a VA RNAII nucleotide sequence that is at least 80% identical to SEQ ID NO: 19.

6. The adenoviral helper plasmid of claim 1, wherein the L4 region comprises a nucleotide sequence encoding L4 (Hexon Assembly) Protein having an amino acid sequence that is at least 80% identical to SEQ ID: NO. 4.

7. The adenoviral helper plasmid of claim 1, wherein the L4 region comprises a nucleotide sequence encoding a partial L4 (Hexon Assembly) Protein having an amino acid sequence that is at least 80% identical to SEQ ID: NO. 6.

8. The adenoviral helper plasmid of claim 1, wherein the L4 region comprises a nucleotide sequence encoding a partial Hexon Associated Precursor (L4 pVIII) protein having an amino acid sequence that is at least 80% identical to SEQ ID NO: 13.

9. (canceled)

10. The adenoviral helper plasmid of claim 1, wherein the adenoviral helper plasmid comprises a nucleotide sequence encoding a partial DNA Terminal Protein having an amino acid sequence that is at least 80% identical to SEQ ID: No 21.

11. The adenoviral helper plasmid of claim 1, wherein the adenoviral helper plasmid does not comprise a nucleotide sequence encoding DNA Terminal Protein.

12. The adenoviral helper plasmid of claim 1, wherein the adenoviral helper plasmid comprises a nucleotide sequence encoding a partial 23 kDa endoprotease having an amino acid sequence that is at least 80% identical to SEQ ID NO: 23.

13. The adenoviral helper plasmid of claim 1, wherein the adenoviral helper plasmid does not comprise a nucleotide sequence encoding 23 kDa endoprotease.

14-21. (canceled)

22. The adenoviral helper plasmid of claim 1, further comprising nucleotide sequences encoding HSV-1 UL30 and HSV-1 UL42,
wherein UL30 has an amino acid sequence that is at least 80% identical to SEQ ID NO: 30;
wherein UL42 has an amino acid sequence that is at least 80% identical to SEQ ID NO: 32; and
wherein UL30 and UL42 are separated by a P2A cleavage site having an amino acid sequence that is at least 80% identical to SEQ ID NO: 34.

23-25. (cancelled)

26. The adenoviral helper plasmid of claim 1, further comprising a nucleotide sequence encoding HSV-1 UL29, wherein UL29 has an amino acid sequence that is at least 80% identical to SEQ ID: No 38.

27-29. (canceled)

30. The adenoviral helper plasmid of claim 1, wherein the E4 region does not comprise E4orf1, and wherein the E4 region does not comprise E4orf2.

31. The adenoviral helper plasmid of claim 1, wherein the E4 region is operably linked to the E4 mini promoter, wherein the E4 mini promoter has a nucleotide sequence that is at least 80% identical to SEQ ID NO: 1.

32. The adenoviral helper plasmid of claim 1, wherein the E4 region is operably linked to the SV40 promoter, wherein the SV40 promoter has a nucleotide sequence that is at least 80% identical to SEQ ID NO: 2.

33. An adenoviral helper plasmid comprising the following adenoviral DNA sequences or regions:
(a) E2a;
(b) an E4 region; and
(c) a VA RNA region;
wherein the adenoviral helper plasmid does not comprise one or more of the following components:
a Fiber or portion thereof;
a L1-52/55K (Packaging Protein 3);
a Peripentonal Hexon-Associated Protein; and
a an L4 region.

34. An adenoviral helper plasmid having at least 80% sequence identity to any one of SEQ ID NO: 41-66.

35. A method of producing a recombinant adenoviral associated viral vector comprising:
transfecting a producer cell with an AAV vector plasmid, an AAV Rep-Cap expressing plasmid, and the adenoviral helper plasmid of claim 1.

36. (canceled)

37. A method of producing a recombinant adenoviral associated viral vector comprising:
transfecting a producer cell with an AAV vector plasmid and the adenoviral helper plasmid of claim 1.

38. (canceled)

39. The adenoviral helper plasmid of claim 1, wherein the L4 region comprises a nucleotide sequence that is at least 80% identical to SEQ ID NO: 3, the nucleotide sequence encoding L4 (Hexon Assembly) Protein.

40. The adenoviral helper plasmid of claim 1, wherein the L4 region comprises a nucleotide sequence that is at least 80% identical to SEQ ID NO: 5, the nucleotide sequence encoding a partial L4 (Hexon Assembly) Protein.

41. The adenoviral helper plasmid of claim 1, wherein the L4 region comprises a nucleotide sequence that is at least 80% identical to SEQ ID NO: 12, the nucleotide sequence encoding a partial Hexon Associated Precursor (L4 pVIII) protein.

42. The adenoviral helper plasmid of claim 1, wherein the adenoviral helper plasmid comprises a nucleotide sequence that is at least 80% identical to SEQ ID NO: 20, the nucleotide sequence encoding a partial DNA Terminal Protein.

43. The adenoviral helper plasmid of claim 1, wherein the adenoviral helper plasmid comprises a nucleotide sequence that is at least 80% identical to SEQ ID NO: 22, the nucleotide sequence encoding a partial 23 kDa endoprotease.

44. The adenoviral helper plasmid of claim 1, wherein the adenoviral helper plasmid further comprises nucleotide sequences encoding HSV-1 UL30 and HSV-1 UL42,
wherein at least one of the nucleotide sequences is at least 80% identical to SEQ ID NO: 29;
wherein at least one of the nucleotide sequences is at least 80% identical to SEQ ID NO: 31; and
wherein UL30 and UL42 are separated by a P2A cleavage site encoded by a nucleic acid sequence that is at least 80% identical to SEQ ID NO: 33.

45. The adenoviral helper plasmid of claim 1, wherein the adenoviral helper plasmid further comprises a nucleotide sequence encoding HSV-1 UL29, wherein the nucleotide sequence is at least 80% identical to SEQ ID NO: 37.

46-47. (canceled)
